(19) United States
(12) Patent Application Publication
(10) Pub. No.: US 2025/0197909 A1
(43) Pub. Date: Jun. 19, 2025

(54) SUBMERGED FERMENTATION PROCESS

(71) Applicant: Novozymes A/S, Bagsvaerd (DK)

(72) Inventors: Jonathan Pham, West Sacramento, CA (US); Xianpeng Cai, Mahomet, IL (US); Ronald Mullikin, Sacramento, CA (US); Sjef Cornelissen, Den Haag (NL); Casper Kanstrup Hermansen, Den Haag (NL); Anne Gay Breuner, Valby (DK); Kim Hansen, Klampenborg (DK); Audrey Diano, Davis, CA (US); Brett McBrayer, Sacramento, CA (US); Stephen Brown, Davis, CA (US); Tyler Chandler, Woodland, CA (US); Haiyan Ge, Davis, CA (US); Frederik Kier Riisgaard, Kalundborg (DK); Benny Cassells, Limhamn (SE); Kirstine Jessen Kristensen, Kalundborg (DK); Valentin Sereda, Raleigh, NC (US)

(73) Assignee: Novozymes A/S, Bagsvaerd (DK)

(21) Appl. No.: 17/915,652

(22) PCT Filed: Mar. 30, 2021
(86) PCT No.: PCT/US2021/024816

§ 371 Date: Sep. 29, 2022

Related U.S. Application Data
(60) Provisional application No. 63/005,142, filed on Apr. 3, 2020.

(51) Int. Cl. C12P 21/00; C12N 9/16; C12N 9/36; C12R 1/07; C12R 1/225; C12R 1/66; C12R 1/80; C12R 1/885

(52) U.S. Cl. CPC C12P 21/00; C12N 9/16; C12N 9/2462; C12Y 301/04001; C12Y 302/01017; C12R 2001/07; C12R 2001/225; C12R 2001/66; C12R 2001/80; C12R 2001/885

(57) ABSTRACT

The present invention provides submerged fermentation processes of producing one or more polypeptide of interest, the process comprising: a) fermenting one or more microorganism that produces the one more polypeptide of interest in a fermentation broth, and b) adding at least one enzyme to the fermentation broth: OR co-expressing the at least one enzyme in the one or more microorganism and secreting the at least one enzyme into the fermentation broth in an amount sufficient to reduce the viscosity of the fermentation broth, compared to when the at least one enzyme is not added or co-expressed; and, optionally, c) recovering the one or more polypeptide of interest.

### REFERENCE TO SEQUENCE LISTING

[0001] This application contains a Sequence Listing in computer readable form. The computer readable form is incorporated herein by reference.

### FIELD OF THE INVENTION

[0002] The present invention relates to submerged fermentation processes of producing a polypeptide of interest.

### BACKGROUND OF THE INVENTION

[0003] In submerged fermentations, the viscosity of the fermentation is of significant importance. With increased viscosity, it becomes more challenging to maintain proper mixing of the broth in the fermenter. Imperfect mixing can affect cell growth and lead to lower product formation rates. Furthermore, in aerobic fermentations, a higher agitation speed or agitation rate is required to maintain the same oxygen transfer rate, when the viscosity increases. Often commercial fermentation plants are operated close to the maximum agitation speed/agitation rate, meaning that an increased viscosity provides for a decreased oxygen transfer rate, which will have an impact on the growth and/or production/productivity. There is therefore a desire to control, in particular to reduce the viscosity of a fermentation broth.

### SUMMARY OF THE INVENTION

[0004] A high viscosity of the fermentation liquid leads to a number of challenges that the skilled person needs to solve in order to run a fermentation process optimally and to obtain the maximum productivity and yield. One effect of a high viscosity of the fermentation liquid is that liquid mixing becomes less efficient, which can lead to spatial variations in important fermentation parameters, such as the pH, temperature and substrate concentration. Such spatial inhomogeneities can affect fermentation performance negatively. Secondly, mass transfer rates are reduced at higher liquid viscosities. In aerobic fermentation processes, oxygen is, in general, provided by injecting or sparging air, oxygen or mixtures thereof through the fermenter. A high viscosity is detrimental to a high oxygen transfer from the gas phase to the liquid phase and this may reduce the productivity and yield of a fermentation process. Furthermore, at a high viscosity, carbon dioxide produced by the microorganisms in the fermenter is transferred less efficiently from the broth to the gas phase. High concentrations of carbon dioxide in the fermentation liquid can have a toxic effect on the microorganisms producing the polypeptide of interest and therefore negatively affect productivity and yield.

[0005] Surprisingly, the instant inventors found that the addition of at least one enzyme, preferably comprising a muramidase, a chitinase, a glucanase or a phosphodiesterase, more preferably comprising a muramidase and a phosphodiesterase, to a submerged fermentation broth resulted in a reduced viscosity compared to when no enzyme was added. Even though the primary parameter affected by the present invention is the viscosity of the fermentation broth, the skilled person using the present invention may observe a number of benefits such as, improved liquid mixing, reduced spatial variation of important fermentation parameters, improved oxygen uptake, improved carbon dioxide removal, higher productivity and improved yield. As such this invention could allow to keep constant viscosity but decrease power input and/or oxygen supply.

[0006] Regarding muramidase addition, the instant inventors have studied different classes of muramidases including GH22, GH24, GH25, GH64, GH71 and GH84. To further study the GH25 family, a phylogenetic tree was built and was used to select enzymes across the tree for maximum diversity. The positive results obtained in the examples below support a high likelihood of finding viscosity reducing enzymes across the GH25 families and also within other GH families.

[0007] Accordingly, in a first aspect, the invention relates to submerged fermentation processes of producing one or more polypeptide of interest, the process comprising:
[0008] a) fermenting one or more microorganism that produces the one more polypeptide of interest in a fermentation broth, and
[0009] b) adding at least one enzyme to the fermentation broth; OR co-expressing the at least one enzyme in the one or more microorganism and secreting the at least one enzyme into the fermentation broth in an amount sufficient to reduce the viscosity of the fermentation broth, compared to when the at least one enzyme is not added or co-expressed; and, optionally,
[0010] c) recovering the one or more polypeptide of interest.

### BRIEF DESCRIPTION OF DRAWINGS

[0011] FIG. 1. Relative viscosity throughout a fed-batch fermentation of a Bacillus licheniformis strain expressing an amylase product. Relative viscosity is measured for a reference batch without lysozyme added, a batch with lysozyme added continuously through the sucrose feed and a batch with lysozyme added directly as a bolus into the fermenter after 40 hours of fermentation.

### DEFINITIONS

[0012] Muramidase: The term “muramidase” activity is defined herein as an O-glycosyl hydrolase, which catalyses the hydrolysis of the glycosidic bond between two or more carbohydrates, or between a carbohydrate and a non-carbohydrate moiety. Muramidases cleave the glycosidic bond between certain residues in mucopolysaccharides and mucopeptides of bacterial cell walls, such as 1,4-beta-linkages between N-acetylmuramic acid and N-acetyl-D-glucosamine residues in a peptidoglycan and between N-acetyl-D-glucosamine residues in chitodextrins, resulting in bacteriolysis. Muramidase belongs to the enzyme class EC 3.2.1.17. This includes enzymes active on the muramidase assay described in materials and methods.

[0013] Chitinase: The term “chitinase” activity is defined herein as an O-glycosyl hydrolase that catalyses the hydrolysis of the glycosidic bonds between two or more carbohydrates, or between a carbohydrate and a non-carbohydrate moiety. Chitinases cleaves the glycosidic bond between certain residues in chitins found in fungal cell walls, such as 1,4 beta-linkages between N-acetyl-Glucosamine residues in chitins and chitosan. Endochitinases (EC 3.2.1.14) randomly splits chitin at internal sites of the chitin chain. Exochitinases have also been divided in two categories, Chitobiosidases (EC 3.2.1.29) and beta-1,4-N-acetylglucosaminidases (EC 3.2.1.30). The amino acid sequence of one preferred chitinase is shown in SEQ ID NO:416.

[0014] Glucanase: The term “glucanase” activity is defined herein as an O-glycosyl hydrolase that catalyses the hydrolysis of the glycosidic bonds between two or more carbohydrates, or between a carbohydrate and a non-carbohydrate moiety. Glucanases cleaves the glycosidic bond between certain residues in glycans found in fungal cell walls, such as 1,3 beta-linkages, 1,4 beta-linkages or 1,6 beta-linkages between glucose residues in 1,3 glucans, 1,4-glucanse, 1,6-glucans or mixed glucans comprising both 1,3-, 1,4-, and/or 1,6 linkages.

[0015] Phosphodiesterase: The term “phosphodiesterase” or “PDE” is defined herein as an enzyme that breaks a phosphodiester bond, typically, in DNA and/or RNA.

[0016] Co-cultivation: The term “co-cultivating” is defined herein as a fermentation process where two or more microorganisms are inoculated into the same fermenter and both are cultivated to provide different components of the fermentation broth. In one preferred co-cultivation one microorganism produces the polypeptide of interest and a second microorganism expresses and secreted an enzyme in a sufficient amount to reduce the viscosity of the fermentation broth.

[0017] Expression: The term “expression” includes any step involved in the production of a polypeptide including, but not limited to, transcription, post-transcriptional modification, translation, post-translational modification, and secretion.

[0018] Sequence identity: The relatedness between two amino acid sequences or between two nucleotide sequences is described by the parameter “sequence identity”.

[0019] For purposes of the present invention, the sequence identity between two amino acid sequences is determined using the Needleman-Wunsch algorithm (Needleman and Wunsch, 1970, J. Mol. Biol. 48:443-453) as implemented in the Needle program of the EMBOSS package (EMBOSS: The European Molecular Biology Open Software Suite, Rice et al., 2000, Trends Genet. 16:276-277), preferably version 5.0.0 or later. The parameters used are gap open penalty of 10, gap extension penalty of 0.5, and the EBLOSUM62 (EMBOSS version of BLOSUM62) substitution matrix. The output of Needle labeled “longest identity” (obtained using the -nobrief option) is used as the percent identity and is calculated as follows:

(Identical Residues×100)/(Length of Alignment−Total Number of Gaps in Alignment)

### DETAILED DESCRIPTION OF THE INVENTION

[0020] The invention relates to submerged fermentation processes of producing one or more polypeptide of interest, the process comprising:
[0021] a) fermenting one or more microorganism that produces the one more polypeptide of interest in a fermentation broth, and
[0022] b) adding at least one enzyme to the fermentation broth; OR co-expressing the at least one enzyme in the one or more microorganism and secreting the at least one enzyme into the fermentation broth in an amount sufficient to reduce the viscosity of the fermentation broth, compared to when the at least one enzyme is not added or co-expressed; and, optionally,
[0023] c) recovering the one or more polypeptide of interest.

[0024] In the present description and claims, a submerged fermentation process is intended to mean a fermentation process where one or more microorganisms are grown in a liquid substrate comprising the necessary nutrients, minerals, vitamins and other components necessary for the growth of the one or more microorganisms. Submerged fermentation processes may be aerobic, where air, oxygen or a mixture is added to the fermenter, or it may be anaerobic where no oxygen is added. Typically, submerged fermentation processes are provided with a form for stirring or agitation of the fermentation broth in order to secure uniform conditions in all parts of the fermenter and evenly distribution of all ingredients in the fermentation broth. In aerobic fermentation processes stirring or agitation is usually required in order to secure a good distribution of (small) air bubbles in the fermentation broth which is required for a good oxygen transfer between the gas phase into the liquid phase.

[0025] The fermentation process may be a batch process, where all ingredients are added to the fermentation tank that is inoculated with the one or more microorganisms and the fermentation proceeds until completion. In the case of an aerobic fermentation process, oxygen is delivered throughout the fermentation process. The fermentation process may be a fed-batch process, starting as a batch fermentation but a given time, typically when the cell density has reached a certain predetermined level, a nutrient solution (feed) is supplied (fed) to the fermenter until the end of the fermentation process. The fermentation process may be a continuously fed fermentation where nutrients are continuously suppled to the fermenter and product is continuously removed from the fermenter. Such fermentation processes are known in the art and the present invention is not limited to any particular fermentation process.

[0026] The fermentation process may be a process where a single microorganism is grown in the fermenter or it may be a co-cultivation process, where two or more microorganisms are inoculated and grown simultaneously during the fermentation process.

[0027] In a preferred embodiment, the polypeptide of interest is a single polypeptide or a mixture of two or more polypeptides.

[0028] In another preferred embodiment, the polypeptide or the mixture of two or more polypeptides is one or more enzyme, preferably one or more secreted enzyme; even more preferably the polypeptide or the mixture of two or more polypeptides is selected from a hydrolase, isomerase, ligase, lyase, oxidoreductase, and transferase, e.g., an aminopeptidase, amylase, carbohydrase, carboxypeptidase, catalase, cellobiohydrolase, cellulase, chitinase, cutinase, cyclodextrin glycosyltransferase, phosphodiesterase, endoglucanase, esterase, alpha-galactosidase, beta-galactosidase, glucoamylase, alpha-glucosidase, beta-glucosidase, invertase, laccase, lipase, mannosidase, mutanase, oxidase, pectinolytic enzyme, peroxidase, phytase, polyphenoloxidase, proteolytic enzyme, ribonuclease, transglutaminase, xylanase, beta-xylosidase.

[0029] The polypeptide of interest can be formed by the complete fermentation broth at the end of the fermentation, or it can be a component or a mixture of components that are recovered from the fermentation broth at the end of the fermentation process using any number of recovery and separation processes known in the area, such as filtrations, centrifugation, precipitation, evaporation, distillation etc.

[0030] The fermentation substrate is according to the invention intended to mean the nutrient composition wherein the one or more microorganisms are grown in the fermentation process. The fermentation substrate is generally an aqueous solution comprising a mixture of nutrients, vitamins, minerals and other components necessary for the growth of the particular selected microorganisms for the particular fermentation process. As examples of suitable nutrients can be mentioned carbohydrates, such as mono-, di-, oligo- or polysaccharides e.g. glucose, maltose, lactose, xylose, arabinose, dextrins, maltodextrin and starches; amino acids, di-oligo- and polypeptides; lipids e.g. mono-, di- or triglycerides, milk, juices and fractions thereof. Other examples of suitable substrates included hydrolysates of naturally occurring materials, e.g. hydrolysed starch, cellulose or lignocellulosic materials. Further examples of suitable nutrients include stream from industrial processes, such as molasses, sugar been pulp, cereal fractions, corn steep liquor etc. As example of suitable minerals can be mentioned sodium, potassium, calcium, magnesium, iron and ammonium salts with suitable anions such as chloride, carbonate, sulphate, phosphate, and nitrates, and further micronutrients, i.e. components required in small amounts for growth such a cupper, iron, molybdenum, cobalt, zinc and iodine.

[0031] The fermentation substrate may be a defined substrate, i.e. a substrate composed of clearly defined components or is may be a complex substrate comprising one or more complex nutrient that can not be clearly defined, such as (hydrolysed) materials, e.g. hydrolysed starch, hydrolysed lignocellulosic material, hydrolysed protein; corn step liquor or molasses.

[0032] When the one or more microorganisms are inoculated into the fermentation substrate the microorganisms grow and covert the nutrients into cell material, products, metabolites and waste material forming a fermentation broth. Thus, the term fermentation broth in intended to mean an aqueous composition comprising nutrients, minerals, cells, cellular materials, products, metabolites, waste products etc; provided by the growth of the one or more microorganism(s) in the fermentation substrate.

[0033] The one or more microorganisms may in principle be selected among any prokaryotic or eukaryotic organisms, which organisms are capable of growing in a submerged fermenter.

[0034] In a preferred embodiment, the one or more microorganism is bacterial; preferably prokaryotic; more preferably Gram positive or Gram negative; even more preferably the one or more microorganism is selected among Gram-positive bacteria, including, Bacillus, Clostridium, Enterococcus, Geobacillus, Lactobacillus, Lactococcus, Oceanobacillus, Staphylococcus, Streptococcus, and Streptomyces; or selected among Gram-negative bacteria, including, Campylobacter, E. coli, Flavobacterium, Fusobacterium, Helicobacter, Ilyobacter, Neisseria, Pseudomonas, Salmonella, and Ureaplasma; most preferably, the one or more microorganism comprises a Bacillus species, preferably selected among Bacillus alkalophilus, Bacillus altitudinis, Bacillus amyloliquefaciens, B. amyloliquefaciens subsp. plantarum, Bacillus brevis, Bacillus circulans, Bacillus clausii, Bacillus coagulans, Bacillus firmus, Bacillus lautus, Bacillus lentus, Bacillus licheniformis, Bacillus megaterium, Bacillus methylotrophicus, Bacillus pumilus, Bacillus safensis, Bacillus stearothermophilus, Bacillus subtilis and Bacillus thuringiensis.

[0035] In another preferred embodiment, the one or more microorganism is a Lactobacillus species, preferably selected among Lactobacillus reuteri, Lactobacillus casei, Lactobacillus paracasei, L. paracasei subsp. paracasei, L. paracasei subsp. tolerans, Lactobacillus rhamnosus, Lactobacillus brevis, Lactobacillus plantarum, Lactobacillus crispatus and Lactobacillus delbrueckii.

[0036] The cell may be a fungal cell. “Fungi” as used herein includes the phyla Ascomycota, Basidiomycota, Chytridiomycota, and Zygomycota as well as the Oomycota and all mitosporic fungi (as defined by Hawksworth et al., In, Ainsworth and Bisby's Dictionary of The Fungi, 8th edition, 1995, CAB International, University Press, Cambridge, UK).

[0037] The fungal cell may be a yeast cell. “Yeast” as used herein includes ascosporogenous yeast (Endomycetales), basidiosporogenous yeast, and yeast belonging to the Fungi Imperfecti (Blastomycetes). Since the classification of yeast may change in the future, for the purposes of this invention, yeast shall be defined as described in Biology and Activities of Yeast (Skinner, Passmore, and Davenport, editors, Soc. App. Bacteriol. Symposium Series No. 9, 1980).

[0038] The fungal cell may be a filamentous fungal cell. “Filamentous fungi” include all filamentous forms of the subdivision Eumycota and Oomycota (as defined by Hawksworth et al., 1995, supra). The filamentous fungi are generally characterized by a mycelial wall composed of chitin, cellulose, glucan, chitosan, mannan, and other complex polysaccharides. Vegetative growth is by hyphal elongation and carbon catabolismis obligately aerobic. In contrast, vegetative growth by yeasts such as Saccharomyces cerevisiae is by budding of a unicellular thallus and carbon catabolism may be fermentative.

[0039] In still another preferred embodiment, the one or more microorganism is eukaryotic, more preferably the one or more microorganism is a fungus, even more preferably a filamentous fungus, including Acremonium, Aspergillus, Aureobasidium, Bjerkandera, Ceriporiopsis, Chrysosporium, Coprinus, Coriolus, Cryptococcus, Filibasidium, Fusarium, Humicola, Magnaporthe, Mucor, Myceliophthora, Neocallimastix, Neurospora, Paecilomyces, Penicillium, Phanerochaete, Phlebia, Piromyces, Pleurotus, Schizophyllum, Talaromyces, Thermoascus, Thielavia, Tolypocladium, Trametes, or Trichoderma or a yeast, including Candida, Hansenula, Kluyveromyces, Pichia, Saccharomyces, Schizosaccharomyces, Yarrowial, Kluyveromyces lactis, Saccharomyces carlsbergensis, Saccharomyces cerevisiae, Saccharomyces diastaticus, Saccharomyces douglasii, Saccharomyces kluyveri, Saccharomyces norbensis, Saccharomyces oviformis, or Yarrowia lipolytica; most preferably the one or more microorganism is an Aspergillus, Penicillium or Trichoderma species, preferably selected from Aspergillus awamori, Aspergillus foetidus, Aspergillus fumigatus, Aspergillus japonicus, Aspergillus nidulans, Aspergillus niger, Aspergillus oryzae, Penicillium purpurogenum, Trichoderma harzianum, Trichoderma koningii, Trichoderma longibrachiatum, Trichoderma reesei and Trichoderma viride.

[0040] In a preferred embodiment, the at least one enzyme is added as a bolus or as continuous addition. Alternatively, the process is a fed batch or a continuously fed fermentation process, and the at least one enzyme is added in the feed.

[0041] Preferably, the at least one enzyme is selected from muramidase, chitinase, glucanase, mannanase, nuclease and phosphodiesterase; more preferably the at least one enzyme is a muramidase, even more preferably a GH22, GH24, GH25, GH64, GH71 and GH84 glycosyl hydrolase; still more preferably the at least one enzyme comprises a muramidase having an amino acid sequence at least 60% sequence identity; e.g. at least 65% sequence identity; e.g. at least 70% sequence identity; e.g. at least 75% sequence identity; e.g. at least 80% sequence identity; e.g. at least 85% sequence identity; e.g. at least 90% sequence identity; e.g. at least 95% sequence identity; e.g. at least 96% sequence identity; e.g. at least 97% sequence identity; e.g. at least 98% sequence identity; e.g. at least 99% sequence identity; or even 100% sequence identity to the amino acid sequence shown in any of SEQ ID NO: 1 to SEQ ID NO:453.

[0042] With respect to dosage of the at least one enzyme, a preferred embodiment comprises adding up to 20,000 mg of the at least one enzyme per kg of fermentation broth; preferably up to 15,000 mg/kg; even more preferably up to 10,000 mg/kg; still more preferably up to 5,000 mg/kg; even more preferably up to 1,000 mg/kg and most preferably up to 500 mg/kg.

[0043] Alternatively, in another preferred embodiment, the at least one enzyme is added in an activity ranging from below the detection limit of the muramidase assay described herein and up to an activity of 0,200 limit of the muramidase assay described herein when diluted 4,000 times; preferably when diluted 3,000 times; more preferably up to 0,200 when diluted 2,000 times; even more preferably up to 0,200 when diluted 1,000 times; still more preferably up to 0,200 when diluted 500 times; most preferably up to 0,200 when diluted 100 times, as described in examples 1 and 16 of WO2018/113743—chicken egg white muramidase under this assay should give an OD450 drop of 0.18 at 5 mg/L as per WO2018/113743 example 16; if not the values should be normalized accordingly.

[0044] In a preferred embodiment, the at least one enzyme is a chitinase, which is added to the fermentation broth in amounts ranging from 0.1 ppm-500 ppm, particularly from 0.1-100 ppm, more particularly from 0.1-50 ppm, such as from 0.5-10 ppm, calculated as amount of enzyme protein to the amount of fermentation broth.

[0045] In a preferred embodiment, the at least one enzyme is a glucanase, which is added to the fermentation broth in amounts ranging from 0.1 ppm-500 ppm, particularly from 0.1-100 ppm, more particularly from 0.1-50 ppm, such as from 0.5-10 ppm, calculated as amount of enzyme protein to the amount of fermentation broth.

[0046] A composition comprising chitinases and glucanases may e.g. be provided by fermenting the filamentous fungus Trichoderma harzianum under conditions inducing the production of such enzymes, for example in form of the commercially available enzyme product Glucanex™, manufactured by Novozymes A/S. The Glucanex™ is preferably added in amounts ranging from 0.1 ppm-500 ppm, particularly from 0.1-400 ppm, more particularly from 0.1-300 ppm, even more particularly from 0.1-200 ppm or from 0.1-100 ppm, such as, from 0.5-10 ppm.

[0047] Techniques for cloning genes encoding the at least one enzyme are known in the art and the skilled person will be able to select suitable methods and techniques for expressing the relevant genes for use according to the present invention.

[0048] In one embodiment the at least one enzyme is added by co-expressing and secreting the at least one enzyme in the one or more microorganism that also produces the polypeptide of interest.

[0049] In another embodiment the at least one enzyme is added to the fermentation broth by co-cultivating a second microorganism in the fermentation broth, wherein the second microorganism produces and secretes the at least one enzyme into the fermentation broth.

[0050] In a preferred embodiment, the oxygen transfer rate in the fermentation broth is increased by increasing the agitation, stirring speed, mixing or oxygenation of the fermentation broth during the fermentation.

[0051] According to the invention, a reduced viscosity is achieved in the fermentation broth during at least part of the fermentation process compared with a similar fermentation process performed with same substrate and same microorganism(s) but without addition of the one or more enzyme.

### EXAMPLES

### Materials and Methods

### Muramidases:

[0052] A muramidase having the sequence of SEQ ID NO: 1 was used in the Examples below. This muramidase is identical to the muramidase disclosed in WO 2013/076253 as SEQ ID NO: 4 and further details disclosing how the enzyme can be obtained can be found in that publication.

[0053] The inventors fully expect other enzymes, e.g., GH18, GH22, GH24, GH25, GH64, GH71, GH84 glycohydrolases and others as exemplified below and also provided in the enclosed sequence list, to be functional according to the invention; examples thereof are provided in SEQ ID NO:2 to SEQ ID NO:453, where the intention is, of course, that mature versions of the amino acid sequences listed are what is to be added to the fermentation broths.

### Muramidase Assay:

[0054] Muramidase activity was determined as described in examples 1 and 16 of WO2018/113743; chicken egg white muramidase under this assay should give an OD450 drop of 0.18 at 5 mg/L as per WO2018/113743 example 16; if not, the values should be normalized accordingly.

### Microorganisms:

[0055] Bacillus licheniformis strains used for the experiments in Examples 1, 2 and 3 are shown below in table 1.

TABLE 1

| Strains | Product produced |
|---|---|
| Strain 1 | Amylase |
| Strain 2 | Mannanase |
| Strain 3 | Amylase |
| Strain 4 | Amylase |
| Strain 5 | Protease |
| Strain 6 | Phosphodiesterase |
| Strain 7 | Phytase |

### Example 1. Reducing Culture Broth Viscosity by Adding Muramidase to a Fermentation for Amylase Production with Recombinant Bacillus licheniformis

[0056] A Bacillus licheniformis strain producing an amylase product was grown in three identical fermenters, containing a defined mineral medium. The fermentations were fed with a sucrose solution. The feed rate was controlled by the dissolved oxygen level. One fermenter, referred to as the reference served as the experimental control and had no muramidase added to the fermentation broth. The second fermenter was supplied with a bolus of 1.6 mg muramidase/kg start fermentation broth after 40 hours of fermentation. The third fermenter was continuously supplied with muramidase through a separate sucrose feed line. To the separate sucrose feed 3.2 mg muramidase/kg sucrose feed was added. The fermentation was ended after 80 hours.

[0057] Viscosity was measured on a Hydramotion Inline Viscosimeter XL7 according to the manufacturer's instructions. Viscosity measurements showed that, in the reference fermentation, viscosity increases as the fermentation progresses linked to the production of biomass and/or other fermentation products. The addition of muramidase, supplied either as a bolus or continuously, reduces the viscosity of the Newtonian fermentation broth compared to the reference (FIG. 1). Supplying muramidase continuously results in a more gradual viscosity reduction compared to the reference, whereas a bolus addition shows more instant reduction in viscosity. Both methods of addition are effective to reduce the viscosity of the culture broth compared to the reference.

### Example 2. Adding Muramidase to Fermentations for Amylase or Mannanase Production with Recombinant Bacillus licheniformis Results in Higher Fermentations Yield

[0058] Example 1 showed a reduction in viscosity by adding muramidase to a fermentation broth, and this reduction allowed other process modifications resulting in yield improvements.

[0059] Multiple Bacillus licheniformis strains (Table 1) producing either an amylase or mannanase product were grown in fermenters; all of the strains were grown in a fed-batch process fed with a sucrose solution and with the feed rate controlled by the dissolved oxygen level.

[0060] Strain 1 was supplied with 1.6 mg muramidase/kg start fermentation broth (added as a bolus) after 40 hours of fermentation. Strain 2, 3 and 4 were supplied with 18 mg muramidase/kg start fermentation broth (added as a bolus) after 25 hours of fermentation. The fermentation of Strain 1 was ended after 80 hours, and after 120 hours for Strains 2, 3 and 4.

[0061] The results showed that by adding muramidase to the four Bacillus licheniformis strains, the yield increased compared to a reference without muramidase added (Table 2). The term yield describes the total amount of enzyme produced at the end of the fermentation relative to the reference fermentation.

TABLE 2
Yield improvements between a reference batch without muramidase
added and a batch with muramidase added. Strain 1 had 1.6
mg muramidase/kg start fermentation broth added after 40
hours. Strain 2, 3 and 4 had 18 muramidase/kg start fermentation
broth added after 25 hours of fermentation.

Yield

| Strains | Reference | Muramidase |
|---|---|---|
| Strain 1 | 100% | 119% |
| Strain 2 | 100% | 116% |
| Strain 3 | 100% | 116% |
| Strain 4 | 100% | 110% |

### Example 3. Yield Improvement in Fermentations for Amylase Production with Recombinant Bacillus licheniformis Depends on Added Muramidase Concentration

[0062] A Bacillus licheniformis strain producing an amylase product (Strain 1) was grown in a fermenter. The fermentation was fed with a sucrose solution. The feed rate was controlled by the dissolved oxygen level. Different concentrations of muramidase (ranging from 0 to 500 mg muramidase/kg start fermentation broth) were added after 25 hours of fermentation as a bolus. The reference batch without muramidase was supplied with comparable volume of water instead of muramidase solution.

[0063] After ending the fermentations, the yield was calculated from each fermentation and compared to a reference with no added muramidase. The results found an increase in yield compared to the reference at increasing concentrations of muramidase (Table 3).

TABLE 3
Yield improvements with increasing amounts of muramidase added
to the fermentation broth compared to a reference without
any muramidase addition. 1, 50 and 500 mg muramidase/kg start
fermentation broth were added after 25 hours of fermentation
as a bolus directly in the fermenters.
Muramidase addition (mg muramidase/kg start fermentation broth)

| | 0 | 1 | 50 | 500 |
|---|---|---|---|---|
| Yield | 100% | 126% | 145 ± 4.4% | 154 ± 4.4% |

### Example 4. Viscosity Reduction of Muramidase in Combination with Oxygen Enrichment

[0064] A Bacillus licheniformis strain producing a protease product (Strain 5) was fermented in a fed batch process with a complex media fed with a sucrose solution controlled by the dissolved oxygen level. Table 4 below shows the experimental setup. This experiment tested the effect of muramidase addition to fermentations with and without oxygen enrichment against a reference process. The reference batch had no muramidase or oxygen enrichment supplied to the fermentation broth. Oxygen enrichment batches with and without muramidase addition were enriched to an average of 35% oxygen of the total airflow in a 100 hour fermentation. The batches with muramidase addition were supplied with two boluses of 50 mg muramidase/kg start fermentation broth after 0 and 48 hours.

[0065] Off-line rheological characterization of the fermentation broth was performed by steady state flow measurements using a “vane-and-cup” geometry ideal for suspension rheology in a controlled strain and stress rheometer (AR-G2, TA Instruments, New Castle, DE). The vane consists of four blades (14 mm W 42 mm H) mounted at right angles, and the cup had a 15 mm radius and contained 28.72 mL fermentation broth. The gap between vane and cup was 4,000 mm. Nine steady state measurements (30 s at each shear rate, where the reported values are averages of the last 15 s measurement at each interval) were made for each sample in the shear rate interval from 10 to 150 s⁻¹.

[0066] Comparison of offline viscosity measurements at shear rates of 46/s and 100/s at the end of the fermentation showed an increase in viscosity for the oxygen enriched fermentations compared to the reference (Table 4). The viscosity increase upon enrichment of oxygen can be linked to additional biomass formation and/or other fermentation products as a result of increased sucrose dosing. A reduction in viscosity is observed upon the addition of muramidase to the fermentations with oxygen enrichment. Muramidase addition to fermentations without oxygen enrichment showed a viscosity reduction compared to the reference fermentations. The relative viscosity reduction observed between oxygen enriched fermentations with muramidase addition and oxygen enriched fermentations without muramidase is bigger compared to the relative viscosity reduction between the fermentations with muramidase addition and the reference fermentations without muramidase.

TABLE 4
Relative viscosity of fermentations with muramidase addition
(100 mg muramidase/kg start fermentation broth), oxygen
enrichment, and oxygen enrichment with 100 mg muramidase/kg
start fermentation broth, compared to a reference fermentation
without oxygen enrichment and muramidase.

| | | | Oxygen | |
|---|---|---|---|---|
| | | | enrichment | |
| | | | with 100 mg | 100 mg |
| | | | muramidase/ | muramidase/ |
| | | | kg start | kg start |
| | | Oxygen | fermentation | fermentation |
| | Reference | enrichment | broth | broth |
| | Relative viscosity vs. reference | | | |
| Apparent shear | 100 ± 2% | 375 ± 12% | 136 ± 16% | 83 ± 5% |
| rate = 46/s | | | | |
| Apparent shear | 100 ± 3% | 353 ± 10% | 136 ± 13% | 80 ± 3% |
| rate = 100/s | | | | |

### Example 5. Yield Improvement in Fermentations for Protease Production with Recombinant Bacillus licheniformis Increased with Muramidase and Muramidase Combined with Phosphodiesterase Addition

[0067] A Bacillus licheniformis strain producing a protease product (Strain 5) was grown in a fermenter. The fermentation was fed with a sucrose solution. The feed rate was controlled by the dissolved oxygen level.

### Experimental Overview

[0068] For experiments with muramidase alone, muramidase in different concentrations (ranging from 30 to 75 mg muramidase/kg start fermentation broth) was added after 0 hours and 48 hours fermentation as a bolus.

[0069] For experiments with muramidase combined with phosphodiesterase, muramidase in different concentrations (ranging from 30 to 75 mg muramidase/kg start fermentation broth) was added after 0 hours and 48 hours fermentation as a bolus. 25 mg phosphodiesterase kg start fermentation broth was added after 0 hours and 48 hours fermentation as a bolus.

[0070] After ending the fermentations, the yield was calculated from each fermentation and compared to a reference with no added enzyme. The results show an increase in yield compared to the reference at increasing concentrations of muramidase (Table 5).

TABLE 5
Yield improvements with no enzyme addition, muramidase added
alone, and muramidase combined with phosphodiesterase.

| Experiment | Yield | Viscosity reduction |
|---|---|---|
| Reference | 0 | 0 |
| Muramidase addition | + | + |
| Muramidase and phosphodiesterase addition | + | + |

[0071] When combined with phosphodiesterase, less muramidase was needed to reach the same increase in yield, as when only muramidase was added. The combination of muramidase with phosphodiesterase resulted in the situation that overall less enzyme was required to achieve the same increase in yield.

### Example 6. Viscosity Reduction in Fermentations for Phosphodiesterase Production with Recombinant Aspergillus oryzae with Mutanase Added

[0072] An Aspergillus oryzae strain producing a phosphodiesterase product (Strain 6) was grown in a fermenter. The fermentation was fed with a glucose solution. The feed rate was added with a fixed ramp. Identical process parameters were applied and the effect on the oxygen transfer was studied using the following principles.

[0073] The total oxygen transfer in the system was determined from a mass balance over the system. The mass transfer rate of oxygen (OTR) can be described by:

$$OTR = kLa ( {DO}^{*} - DO ) ( Nielsen et al 2003 )$$

[0074] Where kLa is the volumetric mass transfer coefficient, DO* is the oxygen concentration in the liquid phase at equilibrium with the gas phase, and DO is the actual oxygen concentration in the liquid phase.

[0075] kLa is influenced by the mixing power input, the superficial gas velocity, and the fermentation broth viscosity:

$$k La = C ( P / V ) \hat{} a * v\_g \hat{} b * my \hat{} c ( Garcia - Ochoa and Gomez 2009 )$$

where P is the power input, V is the broth volume, v_g is the superficial gas velocity and my is the viscosity.

[0076] By keeping the power and superficial gas velocity constant, we can therefore indirectly observe the development in viscosity by calculating the kLa:

$$k La = OTR / ( {DO}^{*} - DO )$$

[0077] In addition to viscosity reduction as seen in table 6, adding mutanase to the fermentation also increased the yield of the fermentation.

TABLE 6
Yield improvement and viscosity reduction with addition of mutanase
(SEQ ID NO: 433) to an Aspergillus oryzae fermentation

| Enzyme added | Yield | Viscosity reduction |
|---|---|---|
| Reference | 0 | 0 |
| 80 mg mutanase/kg (SEQ ID NO: 433) start | + | + |
| fermentation broth added after 48 hours | | |
| fermentation as a bolus. | | |

### Example 7. Lower Agitation Needed and Viscosity Reduction in Fermentations for Phytase Production with Recombinant Aspergillus oryzae with Chitinase Added

[0078] An Aspergillus oryzae strain producing a phytase product (Strain 7) was grown in a fermenter. The fermentation was fed with a maltose solution. The feed rate was added with a fixed ramp.

[0079] The level of dissolved oxygen in the fermentation broth was controlled by manipulation of the agitation speed measured in rounds per minute (RPM) of the agitator. Addition of the chininase led to lower RPM needed to maintain the same level of dissolved oxygen in the broth. As the total oxygen transfer was equal and all other parameters unchanged, the decrease in RPM is equivalent to a viscosity reduction.

TABLE 7
RPM needed to maintain level of dissolved oxygen and
viscosity reduction with addition of chitinase (SEQ ID
NO: 416) to Aspergillus oryzae fermentation

| | RPM | Viscosity |
|---|---|---|
| Enzyme added | reduction | reduction |
| Reference | 0 | 0 |
| 8 mg chitinase (SEQ ID NO: 416)/kg start | + | + |
| fermentation broth added after 96 hours | | |
| fermentation as a bolus. | | |

### Example 8. Yield Improvement in Fermentations for Amylase Production with Recombinant Bacillus licheniformis Using Diverse Glycosyl Hydrolases and Muramidase-Like Enzymes

[0080] A Bacillus licheniformis strain producing an amylase product (strain 1) was grown in a defined mineral medium. The fermentations were fed with a sucrose solution. The feed rate was controlled by the dissolved oxygen level. Eight fermenters, referred to as the reference, served as the experimental control and had no muramidase added to the fermentation broth. The other fermenters were supplied with one to two bolus of 18-50 mg muramidase/L start fermentation broth after 22-72 hours of fermentation. The fermentations were ended after five to six days.

[0081] After ending the fermentations, the yield was calculated from each fermentation and compared to a reference with no added enzyme. Yield is equal to the activity measured at the end of the fermentation multiplied by the broth weight at the end of the fermentation.

[0082] The results show an increase in yield compared to the reference (Table 8).

TABLE 8
Yield improvements with no enzyme addition
(reference) compared to muramidases

| | Yield | Viscosity |
|---|---|---|
| Enzyme added | Improvement | Decrease |
| Reference | 1.00 | 0 |
| Muramidase (n = 4), | 1.39 +/− 0.05 | + |
| SEQ ID NO: 1 | | |
| Mutanolysin (Sigma | 1.17 | + |
| M9901) | | |
| SEQ ID NO: 395 | 1.25 | + |
| SEQ ID NO: 396 | 1.20 | + |
| SEQ ID NO: 397 | 1.29 | + |
| SEQ ID NO: 398 | 1.09 | + |
| SEQ ID NO: 399 | 1.30 | + |
| SEQ ID NO: 400 | 1.22 | + |
| SEQ ID NO: 401 | 1.24 | + |
| SEQ ID NO: 402 | 1.20 | + |
| SEQ ID NO: 403 | 1.13 | + |
| SEQ ID NO: 404 | 1.11 | + |
| SEQ ID NO: 405 | 1.47 | + |
| SEQ ID NO: 406 | 1.09 | + |
| SEQ ID NO: 407 | 1.25 | + |
| SEQ ID NO: 408 | 1.22 | + |
| SEQ ID NO: 409 | 1.27 | + |
| SEQ ID NO: 410 | 1.35 | + |
| SEQ ID NO: 411 | 1.29 | + |
| SEQ ID NO: 412 | 1.27 | + |
| SEQ ID NO: 413 | 1.39 | + |
| SEQ ID NO: 414 | 1.09 | + |
| (GH84) | | |
| Chicken Eggwhite | 1.17 | + |
| (Sigma) | | |

### Example 9. Construction of the B. licheniformis Co-Expression Strain

### Strain:

[0083] MaTa338: Bacillus licheniformis strain producing amylase having a kanamycin marker. Strain 1 is the descendant of MaTa338 after removal of the kanamycin marker.

### Plasmid:

[0084] pHyGe867: plasmid with a temperature sensitive origin and erm gene coding for erythromycin resistance. The plasmid contains a phosphate depletion inducible promoter driving a muramidase.

### Strain Construction:

[0085] The construction of the Bacillus licheniformis strain co-expressing muramidase was done in a similar manner as described in WO2020229191.

[0086] The MaTa338 strain was used as a host strain for transformation with pHyGe867. Correct integration of the muramidase gene leads to the removal of the kanamycin expression cassette. A clone was isolated as both erythromycin, kanamycin sensitive and preserved as HyGe877n7. Correct insertion of the muramidase gene was verified by sequencing.

### Example 10. Co-Expression of Muramidase Decreases Fermentation Viscosity

[0087] Strain 1 and HyGe877n7 were fermented side by side in a minimal medium without exogeneous enzyme addition. The fermentations were fed with a sucrose solution. The feed rate was controlled by the dissolved oxygen level. The fermentations were ended after five days. After ending the fermentations, the yield was calculated from each fermentation and compared to a reference with no added enzyme. Yield is equal to the activity measured at the end of the fermentation multiplied by the broth weight at the end of the fermentation.

[0088] The results show a decrease in viscosity and an increase in yield when the muramidase is co-expressed (Table 9).

TABLE 9
Yield improvements when muramidase is co-expressed

| Enzyme production | Yield | Viscosity reduction |
|---|---|---|
| Strain 1 - reference | 1.00 | 0 |
| HyGe877n7 - co-express | 1.43 | + |

### Example 11. Viscosity Reduction in Fermentations for Cellulase Production with Trichoderma reseei with a Beta 1-3 Glucanase Added

[0089] A Trichoderma reseei strain producing wild type cellulases was on PDA plates for 5-9 days at 28° C. Three 500 ml shake flasks each containing 100 ml of shake flask medium for each strain were inoculated with two plugs from the PDA plates. The shake flasks were incubated at 26° C. for 48 hours on an orbital shaker at 250 rpm. The cultures were used as seeds for larger scale fermentation.

[0090] A total of 160 ml of each seed culture was used to inoculate Applikon Biotechnology 3-liter glass jacketed fermentors containing 1.8 liters of fermentation batch medium. The fermenters were maintained at a temperature of 28° C. and pH was controlled using an Applikon control system to a set-point of 4.75+/−0.25. Air was added to the vessels at a rate of 2.0 L/min and the broths were agitated by Rushton impeller rotating at 1100 rpm. Fermentation feed medium composed of dextrose and phosphoric acid was dosed at a rate of 0 to 15 g/hour for a period of 167 hours based on a dissolved oxygen-controlled ramp. Each enzyme was added in one or two boluses at the final concentration of maximum 0.2 g/L broth. Additions were made from day 2 to day 6 of fermentation. Daily samples were taken from each fermentor, centrifuged, and stored at −20° C. After ending the fermentations, total protein assay was run. The yield was calculated from each fermentation and compared to a reference with no added enzyme. Yield is equal to the total protein assay results multiplied by the broth weight at the end of the fermentation.

[0091] Total protein assay. Day 7 fermentation samples were desalted and buffer exchanged into 50 mM sodium acetate-100 mM NaCl pH 5.0. After desalting the protein concentration of the enzyme compositions was determined using a Gallery Analyzer (Thermo Scientific). Cultures were diluted appropriately in water. An albumin standard (bovine serum albumin; BSA) was serial diluted to a concentration range of 0.66 mg/ml to 0.087 mg/ml in water. A total of 20 μl of each dilution including standard was transferred to a cuvette containing 200 μl of a bicinchoninic acid (BCA) substrate solution (Pierce BCA Protein Assay Kit; Thermo Scientific) and then incubated at 37° C. for 30 minutes. Upon completion of the incubation the optical density of 540 nm was measured for each sample. Sample concentrations were determined by extrapolation from the generated standard curve.

TABLE 10
Yield improvements when viscosity reducing enzymes
are added to the fermentation broth of Trichoderma
reseei compared to no enzyme addition (reference)

| | | Viscosity |
|---|---|---|
| Enzyme(s) added | Yield | reduction |
| Reference | 1.0 | 0 |
| SEQ ID NO: 415; beta 1-3 glucanase GH64 | 1.5 | + |
| Mutanase (8) | 1.4 | + |
| SEQ ID NO: 415 + SEQ ID NO: 416; | 2.0 | ++ |
| endo-beta-1,4-chitinase GH18_5 | | |

### Example 12. Enzyme Induced Culture Broth Viscosity Reduction. (Aspergillus niger Fermentation

[0092] The viscosity of the fermentation broth was measured offline with a Rapid Visco™ Analyser with Thermocline (RVA 4500, Perten Instruments of Australia Pty Limited) according to the manufacturer's instructions. Typical measurements were conducted at 34° C. in a range of shear rates between 30 s⁻¹ and 330 s⁻¹. Apparent viscosity was determined by recording the viscosity value at a shear rate of 160 s⁻¹. Data analysis was performed with the software TCW3 (Perten Instruments). Aliquots of treated and untreated (reference) samples were incubated at 34° C. for 3 hours prior viscosity measurements.

[0093] An Aspergillus niger fermentation process was used to investigate the effect of enzyme addition to culture broth. Typical fed-batch fermentation involved glucose solution as carbon source with a feed rate controlled by the dissolved oxygen level. Fermentation broth of a strain roducing a AMG-NAroduct was collected at specified time point(s). Viscosity reduction potential of the specific enzymes (Table XX) was examined in a series of offline measurements. Equimolar amounts of enzymes were added to corresponding sample.

TABLE 11
Effect of fermentation broth viscosity reduction upon enzyme
addition when compared to reference (no enzyme addition).

| Enzyme added | Viscosity reduction |
|---|---|
| Reference | 0 |
| SEQ ID NO: 420 | + |
| SEQ ID NO: 421 | + |
| SEQ ID NO: 422 | + |
| SEQ ID NO: 423 | + |
| SEQ ID NO: 424 | + |
| SEQ ID NO: 425 | + |

### Example 13. Enzyme Induced Aspergillus oryzae Culture Broth Viscosity Reduction

[0094] Fed batch fermentation on glucose employing a feeding strategy based on online feedback of dissolved oxygen level. Samples for offline viscosity measurements were treated with corresponding enzyme (Table 12) followed by incubation for 3 hours at 34° C. Viscosity reduction effect was normalized to protein concentration.

TABLE 12
Effect of fermentation broth viscosity reduction upon enzyme
addition when compared to reference (no enzyme addition).

| Enzyme added | Viscosity reduction |
|---|---|
| Reference | 0 |
| SEQ ID NO: 426 | + |
| SEQ ID NO: 427 | + |
| SEQ ID NO: 428 | + |
| SEQ ID NO: 429 | + |
| SEQ ID NO: 430 | + |
| SEQ ID NO: 431 | + |
| SEQ ID NO: 432 | + |
| SEQ ID NO: 433 (Mutanase) | + |

### Example 13. Bacillus Fermentation Broth Viscosity Reduction Using Diverse Muramidases and Off-Line Viscosity Measurements

[0095] A Bacillus licheniformis strain producing an amylase product was used to investigate the effect of enzyme addition to a culture broth. Viscosity of the culture broth was measured off-line following the addition of individual enzymes (Table 13).

TABLE 13
Fermentation broth viscosity reduction with no enzyme
addition (reference) compared to the addition of
diverse glycosyl hydrolases as indicated.

| Enzyme added | Viscosity reduction |
|---|---|
| Reference | 0 |
| SEQ ID NO: 434 | + |
| SEQ ID NO: 435 | + |
| SEQ ID NO: 436 | + |
| SEQ ID NO: 437 | + |
| SEQ ID NO: 438 | + |
| SEQ ID NO: 439 | + |
| SEQ ID NO: 440 | + |
| SEQ ID NO: 441 | + |
| SEQ ID NO: 442 | + |
| SEQ ID NO: 443 | + |
| SEQ ID NO: 444 | + |
| SEQ ID NO: 445 | + |
| SEQ ID NO: 446 | + |
| SEQ ID NO: 447 | + |
| SEQ ID NO: 448 | + |
| SEQ ID NO: 449 | + |
| SEQ ID NO: 450 | + |
| SEQ ID NO: 451 | + |
| SEQ ID NO: 452 | + |
| SEQ ID NO: 453 | + |
| SEQ ID NO: 453 | + |

The application's sequence listing, which the Patent Office published only in electronic form, follows.

SEQUENCE LISTING (453 sequences)

SEQ ID NO: 1 - protein, 208 aa, Acremonium alkalophilum
RIPGFDISGWQPTTDFARAYANGDRFVYIKATEGTTFKSSAFSRQYTGATQNGFIRGAYHFAQPAASSGAAQARYFASNGGGWSKDGITLPGALDIEYNPNGATCYGLSQSAMVNWIEDFVTTYHGITSRWPVIYTTTDWWTQCTGNSNRFANRCPLWIARYASSVGTLPNGWGFYTFWQYNDKYPQGGDSNWFNGDASRLRALANGD

SEQ ID NO: 2 - protein, 176 aa, Acremonium alkalophilum
MVSFKQLALLALGAVQVQAQCVGPAINSAALNLIKEFEGWRPNIYRDPVGLPTVGYGHLCRDSSCSDVPYPIPLSVANGERLLRSDLATASSVVLNANQYGALVSWAFNVGCGATSTSTLIRRLNAGESPNTVAAQELPRWNKAGGQVLPGLVRRRAAEVELHRTSTSVRALPACS

SEQ ID NO: 3 - protein, 207 aa, Myceliophthora fergusii
AVQGFDISHWQSSVDFKAAYNSGARFVIIKATEGTSFIDPKFSSHYTGATNAGFIRGAYHFAHPGQSSGEAQADYFLAHGGGWTPDGITLPGMLDLEAYNAGECWGLSQSAMVAWIKAFSDRYHARTGVYPMLYTNLSWWKTCTGNSKAFVNTNPLVLARWASSPGEIPGGWPWQTIWQNSDSYRYGGDSDIFNGDMNQLRRLATAA

SEQ ID NO: 4 - protein, 216 aa, Penicillium sp
STIQPRASGVQGFDISSYQGTVNFAGAYGAGARFVMIKATEGTTYIDSTFSSHYDGATSAGLIRGAYHFAHPDSSSGATQAEYFLAHGGGWTNDGITLPGMLDIEYNPSGSTCYGLSASAMVSWIKDFGETYNSKTGRYPMIYSTADWWSTCTGDSTSFSSDYPLVLAQYASSISTVPGGWPYQSFWQNADSYSYGGDSDLWNGSEDSLKTFAKGS

SEQ ID NO: 5 - protein, 204 aa, Paecilomyces sp. XZ2658
TVAGFDISNYQPSVNFAKAYADGARFATEGTTYIDPSFSSHYTGATNAGLIRGGYHFAHPGSSTGAAQATYFLAHGGGWSKDGITLPGMIDLEYNPSGATCYGLSTSAMVSWISDFVETYHSKTGVYPLIYTSTSWWNQCTGSSTAFASKCPLVVARYASSVGTLPAGWGYQTIWQNSDSSPWGGDNDIFNGSLDQLKRIANAS

SEQ ID NO: 6 - protein, 203 aa, Paecilomyces sp. XZ2658
AVQGHDVSHWQGNINWGAVKAAGVKFTYIKATESTNYIDPSFNANYVGATNTGLIRGAYHFARPGDSSGAAQANYFVSHGGGWSADGRTLPGALDLEAGCSGLSQSAMTAWIRDFSNTYHARTGRFPVIYTTTSWWKTCTGNASGFQNDHPLWIARWGPSPGELPAGYGFHTFWQYADKGPLPGDQDNFNGDEAGLARLARGS

SEQ ID NO: 7 - protein, 204 aa, Mortierella alpina
ALPKGIDVSHWQGDVNWNSVKAAGIEFVYIKATESINYIDSKFDANYVGATNAGLIRGGYHFARPAASSGAVQANYFLANGGGWSSDGITLPGALDLEAGCSGLSQAAMTAWVRDFSDTYHARTGRYPVIYTTTSWWKQCTGNASGFQNNNPLWIARWASSAGELPAGYAFHTFWQYADKGPNPGDQDYFNGDSAGLRRFAKGS

SEQ ID NO: 8 - protein, 208 aa, Purpureocillium lilacinum
AVKGFDISHYQPNVDFAKAYADGARFVMIKATEGTTYTDPSFSSHYTGATKAGFIRGGYHFARPASSSGAAQAKYFIAHGGGWSKDGITLPGMLDMEYQSSSSACGGLSQSAMVSWINDFVNTYHAATGVYPLIYTSTSWWTQCTGNSAAFGSKCPLVVARYASSVGTLPAGWGFYTFWQYSDAAPWGGDADTFNGDITALKKIANAG

SEQ ID NO: 9 - protein, 207 aa, Onygena equina
AVPGIDVSGYQGNVNWANVANAGKKFAYVKATEHTNYINPYFAQQYNGAYNQGIIRGAYHYAHPNGASGASQANYFLAHGGGWSADGKTLPGAVDLEYGPNGSTCWGISQSAMIAWIRDFSNTYRAKTGRPPVIYTSTSWWKTCTGNYGGFGNDNPLWIARYSSTVGELPAGWPFHSIWQNNDNSGVGGDGDIWNGDLAGLQRFAKG

SEQ ID NO: 10 - protein, 207 aa, Lecanicillium sp. WMM742
SVQGFDISHYQSSVNFGAAYADGARFVIIKATEGTTYRDPKFSEHYGGATKAGFIRGGYHFAQPASSSGAAQANFFLAHGGGWSGDGITLPGMLDLEYGPNGNTCYGLGPASMRSWISDFVETYHAKTGRYPLIYTSTSWWKTCTGNTSLFADKCPLVVARYNSQVGELPAGWGFYTFWQFNDHYKHGGDSDVFNGAYSQLQKIATG

SEQ ID NO: 11 - protein, 216 aa, Penicillium atrovenetum
TPLESRASGVQGFDISSYQGTVDFAGAYAAGARFVMIKATEGTTYTDKTFSSHYEGASSAGLIRGGYHFAHPDSSSGAKQAEYFLAHGGGWSNDGKTLPGMLDIEYNPSGATCYGISKSAMVAWVKDFGETYKGKTGRYPMIYTTADWWNTCTGGSTAFSKDYPLVLARYSSSVGTIPGGWPYQSFWQNSDKYTYGGDSDLWNGSEASLKTFAKGA

SEQ ID NO: 12 - protein, 207 aa, Flammulina velutipes
RLNGIDVSGYQPNVNWATVKANGVSFAYIKATEGTTYTNPSFSSQYTGATKAGLIRGSYHFAHPSSSTGAAQARYFVAHGGGWSGDGITLPGALDIEYNPSGATCYGLSTSSMVNWIADFSNTYHSLTGRYPVIYTTADWWRTCTGNSASFANNSPLWIARYASTIGTLPAGWSYATFWQYADSGSNPGDQDYFNGDAAGLKRLATS

SEQ ID NO: 13 - protein, 207 aa, Sporormia fimetaria
AVPGFDISHYQSSVNYAGAYSSGARFVIIKATEGTTYIDPKFSDHYIGATNAGLIRGAYHFARPAASTGAAQANYFVSHGGGWSADGITLPGMLDMEYGSTSACHGLSQSAMVTWITSFVNQYNSLTGRYPMIYTTADWWQTCTGNSAAFNTKSPLVLARYSSSAGTVPGGWPYYTIWQFNDAYAYGGDSDTFNGDLAGLKRLAKGS

SEQ ID NO: 14 - protein, 201 aa, Poronia punctata
AVQGFDISHYQSSVNFGAAKSSGAQFVIIKATEGTSYTDPSFSSHYTGATNAGLIRGGYHFAHLDSSSGAAQAKYFLAHGGGWSGDGITLPGMLDLEGSCVLSASATVSWIKDFSNTYHSSTGVYPLIYTNPSWWSSCTGNSKAFIDTNPLVLARYASSAGTPPGGWPYYTIWQYNDAYKYGGDSDVFNGDLAGLKRLAKG

SEQ ID NO: 15 - protein, 201 aa, Poronia punctata
QVQGFDISSYQPSVDFAGAYADGARFVIIKATEGTGYIDPTFSDHYVGATNAGLLRGGYHYAHLDSTSGATQAQYFLANGGGWSGDGITLPGMLDLEGDCVLSAADAVAWIKDFSDTYHASTGVYPLLYTNPSWWASCTGDSSAFIDTNPLVLAHYADAAGTPPGGWPFYSFWQYNDAYPYGGDSEVWNGDMDGLLRLASG

SEQ ID NO: 16 - protein, 203 aa, Lecanicillium sp. WMM742
VDSSSEVSVAIYKKALGQGFTRAIFRGYQEACSQGGRVDPTFVPSYKNAVAAGYKDFDAYFFPCTGKTNKCKPYAAQLAELLDTIKGQKLAIRRIWLDIETDRVCNPFDYGAQGNLAEAKKLVAAFRDAKLDWGIYTSPTQWETIFGAKTVELAKDVPLWFAKFDNVETLELKTPFGGWTKADAKQYTDQSASNKFDLNVFSA

SEQ ID NO: 17 - protein, 208 aa, Lecanicillium sp. WMM742
TVQGFDVSGYQPTVNWGAAYSSGARFVMIKATEGTGYISSSFGSQYPGATNAGFIRGGYHFALPDRSSGSAQADYFLAHGGGWSGDGITLPGMLDIEYNPYGATCYGLSQGAMVNWISDFVEHYKARTTQYPIIYTTTDWWKTCTGNSPAFGQKCPLSLARYSSSVGEIPNGWPFQTFWQNSDKYAYGGDSQIFNGAYSQLQKIARGG

SEQ ID NO: 18 - protein, 207 aa, Trichobolus zukalii
AVPGFDISHYQPSVNYAGAYNSGARFVIIKATEGTTYTDPVFSTHYTGATKAGLIRGGYHFARPASSSGSAQADFFFKNGGGWSADGITLPGMLDMEYGSTSSCHGLSQTAMVNWISDFVNRYKTLSGRYPMIYTGYYWWVECTGNSNKFATTCPLVLARYSSSVGEIPGGWGYQTIWQFNDKYAYGGDSDSFNGSLDRLKALAKGT

SEQ ID NO: 19 - protein, 207 aa, Penicillium citrinum
LIHAVDSSSEVSVDIYKKALSEGFSRAIFRGYQEACSQGGRVDPTFLPSYKNAQTAGYKDFDAYFFPCTGSGNKCKPYDVQIGELVDAIKKNNMAIRRIWVDFEKDKTCNPFNWDPKRNIDEAKRIIGAVRKTKFDFGVYTSATQWTSIFGSKDVVLANDVPLWFAKFDNVENLDLAQPFGGWTKADGKQYTDKSASKKFDLNVFSA

SEQ ID NO: 20 - protein, 207 aa, Cladorrhinum bulbillosum
AVQGFDISHYQSSVNFQAAYNSGARFVIIKATEGTTYIDPKFSSHYTGATNAGLIRGGYHFAHPDSSTGAAQADFFLAHGGGWSGDGITLPGMLDLESVSGKATCFGLSASSMVAWIKSFSDRYHTRTGRYPMLYTNPSWWTTCTGNSNAFVNTNPLVLARYASAPGTIPGGWPYQTIWQNSDSYTYGGDSDIFNGALSGLQKLASG

SEQ ID NO: 21 - protein, 208 aa, Umbelopsis westeae
KLKGLDVSGYQPNVAWSTVKANGASFAYIKATEGTNYKNPSFAQQYNGAYNAGLIRGSYHFAQPSSSTGAAQANYFLAHGGGWSPDGKTLPGALDMEYNPHGSTCYGLSKDAMVKWIKDFSNTYHSATGRYPVIYTTTSWWTTCTGNSAAFGATNPLWIARYSSTAGNLPNGWAFYSFWQNADSGIFPGDQDIWNGDAAALSRMAKGA

SEQ ID NO: 22 - protein, 208 aa, Zygomycetes sp. XZ2655
TLPGLDVSSYQGNVNWGTVASQGAKFAYVKATEGTTYTNPYFASQYDGSYNAGLIRGAYHFAHPDSSSGATQANYFLAHGGGWSADGKTLPGALDIEYNPNGAECYGLSQLAMISWIQDFSNTYHSHTGRYPVIYTTTDWWTTCTGNSAAFGTNNPLWIARYSSSVGTLPAGWGYESFWQKASSGTFPGDQDIWNGDAAGLSRFATGK

SEQ ID NO: 23 - protein, 206 aa, Chaetomium cupreum
TVQGFDISGYQPNVNFAAAYAAGARFVIIKATEGTSYISPSFSSQYTGATNAGFIRGGYHFAHPGASSGTTQADYFIAHGGGWTPDGITLPGMLDLESESSGTCWGLSASAMVAWIKDFSDHYHSRMGVYPLLYTNPSWWEECTGNSNAFVDTNPLVLAHYSSSVGTIPGGWPYETIWQNSDSYAYGGDSDVFNGDLAGLQRLARG

SEQ ID NO: 24 - protein, 207 aa, Cordyceps cardinalis
LIHAVDSSSEVSVDVYKKALAEGFTRAIFRGYQEACSQGGRVDPTFLPSYKNAQKAGYKDFDAYFFPCTGSGNKCKPYAKQIGELVDAIEGNQLAIRRIWIDIETDKVCNAFNWGAEGNIQEAKKLIAAVRGTKRDFGIYTSATQWENIFGSRTVELAKDVPLWFAKFDNVETLELKTPFGGWTKADAKQYTDKSASKKFDLNVFSA

SEQ ID NO: 25 - protein, 218 aa, Aspergillus sp
LPTKLAARYSTVQGFDVSNYQPNVDFSAAKSAGAEFVIIKATEGTDYKDTYFNSHYTGATNAGLIRGGYHFARPDKSSGTAQAEYFLAHGGGWSKDGRTLPGMLDIEYNPYGATCYGLSHSAMVSWVNEFLNEYHSKTGVYPLLYTTADWWNQCTGNAHGFGNKSPLVLASYSSESPRTVPGDWQTWTIWQNADKYKYGGDSDIFNGDLTQLKKIVEG

SEQ ID NO: 26 - protein, 208 aa, Pycnidiophora cf. dispera
AVSGMDISHYQGTNYNFAGAYSSGARFVIIKATEGTTYTDPQFSANYIGATNAGFIRGAYHFARPAASTGAVQASYFVSHGGGWSSDGITLPGMLDMEYGSTSTCHGLSVSAMNTWIASFVNQYKSLTGAYPMIYTTADWWKTCTGDSTAWNTKCPLVLARYSSSVGTIPGGWPYHTIWQYSDSYAYGGDSDTFNGDLAGLKRLAKGS

SEQ ID NO: 27 - protein, 210 aa, Thermomucor indicae-seudaticae
YQTGLDVSALTSTSSFSCAKNLGYDHVIARCYMEAYGNNPGGKVDPNCYSNYKNAKAAGFTSVDIYMFPCTGRSTCKSPATQVQEIVDYVGAHKMIVGTLWLDVEVDSAANNWPSTSEARSTLRAFKTALDKSGWKWGVYSSKSQWTRITGSASWVLDPSVPLWYSHYDDTLSFSDYPSHAFGGWSKPTIKQYTGDASFCSASWDKNYYG

SEQ ID NO: 28 - protein, 207 aa, Isaria farinosa
LTHAVDSSSEVSVDIYKKALGQGFTRAIFRGYQEACSLGGRVDPTFVPSYKNAVAAGYKDFDAYFFPCTGTTNKCKPYATQLAELLDTISSQKLAIRRIWLDIETDQVCSPFDYGAQGNIAEAKKLVAAFRAAKHDWGIYTSPTQWETIFGSKTFVLANDVPLWFAKFDNVETLDLKTPFGGWTKADAKQYTDQSASKKFDLNVFSA

SEQ ID NO: 29 - protein, 208 aa, Zopfiella sp. t180-6
AVQGFDVSHWQSSVNFAAAYNSGARFVIIKATESNNYIDPKFNTYYPAATSAGLIRGGYHFAHPGETTGAVQADYFIAHGGGWSSDGITLPGMLDLENASGYPACWGLSQSAMVSWIKAFSDRYKARTGVYPMLYTNPSWWTSCTGNSNAFVNTNPLVLARYASSPGTIPGGWPYQTIWQNSDSYTYGGDSDIFNGDLAGLKRLAKGS

SEQ ID NO: 30 - protein, 217 aa, Malbranchea flava
GPKEFESRASGVQGFDISGWQSNVNFAGAYNSGARFVMIKASEGTTFKDRQFSNHYIGATKAGFIRGGYHFALPDVSSATAQVNHFLASGGGWSRDGITLPGMLDIESNPYGAQCYGLDAGRMVAWIREFVDAYKRATGRYPLIYTSPSWWQTCTGNSNAFIDKCPLVLARWASSPGTPPGGWPFHSFWQYADSYQFGGDAQVFNGDEAGLKRMALG

SEQ ID NO: 31 - protein, 208 aa, Hypholoma polytrichi
LVYGVDSSSLVPVATYQKALGEGFTKAVIRGYEEACGVGGEVDPNFVPSYKNARAAGYTDIDMYWFPCNGSTHSCKSYAAQLAAIAAAFSANAMKIGTIWIDIEKDAAICNNWDYGTAGNLAQAKALIAAAKASGFNFGIYSSPGEWSTIFGSTSVVVDNSAPLWFATYNNVQTLTLGTPFGGWSTAVGHQYTDVSASGLFDLNVFAH

SEQ ID NO: 32 - protein, 201 aa, Aspergillus deflectus
AVQGFDISHYQSSVDYAGAYSSGARFVMIKATEGTTYTDPAFSTHYTGATNAGLIRGGYHFARPGSSSGAAQAEYFLAHGGGWTGDGITLPGMLDLEAGCSGLSASAMVSWIQDFGETYKASTGRYPMIYTTTSWWSSCTGNNGGFGDYPLVLARWASSPGELPNGWSVHSFWQNADTYEYGGDSEIWNGSQENLVKFASQ

SEQ ID NO: 33 - protein, 202 aa, Ascobolus stictoideus
AVPGFDISHYQSTVNFADAYSSGARFVIIKATEGTTYKDPKFSSHYTGATNAGLIRGGYHFARPASSTGAVQAQYFVSNGGGWSGDGLTLPGMLDLEGDCAGLSQAGMVSWITSFVNKYKALTTRYPMIYTTNSWWNTCTGNSQAFSANCPLVIARYNSVVGTIPGGWPYYTIWQFNDAYSYGGDSDTFNGAYSQLVKLATG

SEQ ID NO: 34 - protein, 207 aa, Coniochaeta sp
TVQGFDISHYQPTVNYAGAYNAGARFVIIKATEGTTYTDPSFSTHYNGATKAGLIRGGYHFAHPGVTTGAAEANFFLAHGGGWSGDGITLPGMLDLESEGSNPQCWGLSTSGMVAWIKSFSDRYHTVTGRYPMLYTNPSWWSTCTGNSNAFVNTNPLVLARYASAPGTIPGGWPYQTIWQNSDSYSYGGDSDIFNGNLASLQKLATG

SEQ ID NO: 35 - protein, 202 aa, Daldinia fissa
AVPGFDISHYQSSVDFGAAYSSGARFVIIKATEGTTYQDPKFSSHYAGATNAGLIRGGYHFARPASSSGAAQATFFLAHGGGWSGDGITLPGMLDLEGDCAGLSTSAMVSWIRDFSDTYHGKTGRYPLLYTNPSWWSSCTGGSSAFVNTNPLVLARYASSPGALPGGWPYYTIWQFNDAYKYGGDSDTFNGDLTQLKKLASG

SEQ ID NO: 36 - protein, 201 aa, Rosellinia sp
AVQGFDISHYQSSVNFAGAYSAGARFVIIKATEGTSYIDPKFSSHYIGATNAGLIRGGYHFAHLGSSSGAAQANYFLAHGGGWSGDGITLPGMLDLEGDCVLSASGAVAWIKDFSDTYHSKTGVYPLLYTNPSWWSSCTGNSNAFVNTNPLVLARYSSSAGTPPGGWPYYTIWQYNDAYAYGGDSDVFNGDMAGLLRLAKG

SEQ ID NO: 37 - protein, 202 aa, Ascobolus sp. ZY179
AVPGFDISHWQSSVNFASAYSSGARFVIIKATEGTTYKDPKFSSHYTGATKAGFIRGGYHFARPASSTGAAQAQFFASNGGGWSGDGITLPGMLDLEGDCAGLSQSGMVSWISSFVNKYRSLTGRYPMIYTTNSWWVTCTGNSKAFSSNCPLVIARYNSVVGTIPGGWPYYTIWQYNDAYKYGGDSDTFNGAYSQLVKLATG

SEQ ID NO: 38 - protein, 206 aa, Curreya sp. XZ2623
TVPGFDISHYQGTVNFAGAYSSGARFVIIKATEGTTYTDPNFSNNYVGATNAKFIRGAYHFARPDGGSGSTQAQFFHSHGGGWSGDGITLPGMLDIEYGPTSTCYGLSTSAMVTWITDFVNEYHALTGRYPLIYTTNDWWNTCTGNTNKFSTTCPLVLARYSSSVGTIPGGWPFQTIWQFNDNYAYGGDSDTFNGDLAGLKKLATG

SEQ ID NO: 39 - protein, 202 aa, Coniothyrium sp
AVQGFDISHYQASVNFAAAYSGGLRFVYIKATEGTTYQDPAFSSHYSGATSAGFIRGGYHFARPASSTGAAQASYFVAHGGGWSNDGITLPGMLDLEGDCAGLSTASMVSWISSFSNQYHSLTGRWPVIYTTNSWWTTCTGNSAAFNANSPLMLARWGSTAGTIPGGWPYYTIWQYKDSNTYGGDSDVFNGDATQLKKLATG

SEQ ID NO: 40 - protein, 202 aa, Hypoxylon sp
AVPGFDISHYQSNVDFGAAYSSGARFVIIKATEGTTYQDPSFSTHYTGATKAGLIRGSYHFARPGSSSGAAQATYFLAHGGGWSGDGITLPGMLDLEGDCAGLSTNAMVAWIRDFSDTYHGRTGRYPLLYTNPSWWSGCAGGSAAFVGTNPLVLARYAGSPGALPGGWPYYTIWQFDDAYKYGGDSDTFNGDLTQLKKLASG

SEQ ID NO: 41 - protein, 202 aa, Xylariaceae sp. 1653h
AVPGFDISHYQSSVDFAAAYSAGARFVIIKATEGTTYIDPSFSSHYTGATNAGLIRGGYHFAHPGSSSGATQANYFLAHGGGWSGDGITLPGMLDLEGDCAGLSTSAMVSWIKDFSNAYHSKTGRYPLLYTNPSWWSSCTGSSSAFVNTNPLVLARYSSSAGTPPGGWPYYTIWQFNDAYKYGGDSDTFNGEYASLQKLATG

SEQ ID NO: 42 - protein, 202 aa, Hypoxylon sp
AVPGFDISHYQSSVDFAAAYNSGARFVIIKATEGTTYIDPSFSSHYTGATKAGFIRGGYHFAHPGSSSGAAQANYFLAHGGGWSGDGITFPGMLDLEGDCAGLSTSAMVSWIKDFSDTYHSKTGRYPLLYTNPSWWSSCTGDSSAFVNTNPLVLARYSSSAGTPPGGWPYYTIWQFNDAYKYGGDSDTFNGNYASLQKLATG

SEQ ID NO: 43 - protein, 206 aa, Yunnania penicillata
DVDGFDISHYQETVDYAGAYGAGARFVIIKATEGTNYIDSSFNTHYAGATDAGLIRGGYHFAHPGETTGAEQADYFIAHGGNWSNDGITLPGMLDLEGEGSTTCWDLSAADMVAWIKAFSDRYQEVTSRYPLLYTNPSWWSECTGNSDAFVDTNPLVLARYASSPGEIPGGWPAQTIWQNSDSYSFGGDSDIFNGDEAGLKKLASG

SEQ ID NO: 44 - protein, 207 aa, Engyodontium album
RVQGFDISHYQPSVDFNAAYADGARFVIIKATEGTTYKDPKFSQHYIGATNAGFIRGGYHFAQPASSSGAAQADYFLKNGGGWSSDGITLPGMLDMEYNPNGSACYGLSQASMRNWINDFVNTYHSRTGVYPLLYTTTSWWKTCTGNTAMFADKCPLVIARYNSVVGELPAGWSFWTIWQYNDHYKHGGDSDAFNGDYSQLQRIARG

SEQ ID NO: 45 - protein, 208 aa, Metapochonia bulbillosa
TVAGFDISNYQPTVDFKKAYADGARFVIIKATEGTTYTDPSFSSHYTGATQAGLIRGGYHFAHPGSGTGAAQANYFLAHGGGWSKDGITLPGMIDLEYNPSGATCYGLSASGMVSWISDFVETYHSKTGVYPLIYTSTSWWNQCTGSSTAFGNKCPLVVARYASSVGALPAGWGFQTIWQNSDKSPWGGDNDIFNGSLDQLKRIANAS

SEQ ID NO: 46 - protein, 215 aa, Hamigera paravellanea
APLEARAGSVQGFDISHYQAKVDFAAAYRSGARFVIIKATEGTTYTDPAFSSHYTSATNAGFIRGGYHFAHPDSSSGAAQATYFLAHGGGWSGDGITLPGMLDLEYNPSGATCYGLSDAAMVAWIQDFVDTYHARTGRYPMIYTTADWWNTCTGNSSKFSQTCPLVLARYASSVGTVPGGWGYQTIWQNSDSYAYGGDSDIFNGDETQLKKLASG

SEQ ID NO: 47 - protein, 217 aa, Metarhizium iadini
SPVELEQRAASVKGFDISGYQPNVDFNKAYADGARFVIIKATEGTTYIDKTFSKHYTGATKAKLIRGAYHFAHPGQNKASAEADFFVQHGGNWSKDAITLPGMVDLESEKGHPPCWGLSHSAMVAWISEFVAAYHKKTTRYPMLYTNPSWWSACTGNSKAFKDTCPLVLARYASSPGAIPGGWPAQTIWQNSDKSPWGGDSDMFNGDLAQLKKLATG

SEQ ID NO: 48 - protein, 214 aa, Thermoascus aurantiacus
ELDKRARGVQGFDISHYQPNVDFKGAYNSGARFVIIKATEGTTYKDPAFSKHYIGATEAGLIRGGYHFAHPDKSSGAAQANFFLAHGGGWSGDGITLPGMVDLEYNPSGDACYGLSDSQMVSWIRDFVNTYHAHTGRYPMIYTTADWWKRCTGDSHAFSTTCPLVLARYNSSPGTVPGGWPYHTIWQNSDKYRFGGDSDIFNGDLAGLKRLAKG

SEQ ID NO: 49 - protein, 208 aa, Clonostachys rossmaniae
AVPGFDISGWQKSTDFAKSYANGDRFVYIKATEGTTFKNPLFSKQYTGATNARLIRGAYHFAQPASSSGASQARFFVANGGGWSNDGITLPGAVDMEYNPSGATCYGLSKTAMVNWIEDFVSTYQALTGRWPVVYTTLDWWTQCTGNSAKFGDRCPLWVARYASAVGQIPAGWSFHTIWQYNAKYPEGGDSDIFNGDETRLKALASGA

SEQ ID NO: 50 - protein, 203 aa, Simplicillium obclavatum
APKGIDVSHWQGSINWGAVKANGIEWAYIKATESTNYKDPNFNANYVGATNAGLIRGAYHFARPGDSSGAAQANYFASNGGGWSADGITLPGAVDLEAGCSGLSQSAMTAWIKDFSNTYHARTGRYPAIYTTTSWWKQCTGNASGFQNNNPLWIARWASSVGELPAGYSYHTFWQYADHGPNPGDQDVFNGDSAGLKRMAKGS

SEQ ID NO: 51 - protein, 216 aa, Aspergillus inflatus
APLEARANTVQGFDISSFQPNVDFAAAYKAGARFVMMKATQNTNYVDKTFNAHYEGATKAGLIRGGYHFAIPNGPSGAAQAEYFLAHGGGWSDDGKTLPGMIDLEYNPYGQTCYDLSAAKMVDWIKDFSNTYHAKTKRYPMIYTTANWWKECTGDSKEFSQTNPLVLARYSSSAGTVPGGWPAYSFWQNADKYKFGGDSDIWNGSEDNLKKFAKGA

SEQ ID NO: 52 - protein, 207 aa, Paracremonium inflatum
KVLGFDISHYQATVDFNAAKDAGARFVIIKATEGTTYKDPAFSKHYTGATKAGLIRGGYHFAQPASSSGAAQATFFLAHGGGWSSDGITLPGMLDLEYNPSGSTCYGLSQSSMVQWISDFIDTYHSKTGRYPLIYTSTSWWKTCTGNSSKFAANCPLVVARYSSSVGELPAGWTYYTIWQNSDSYKYGGDSDIFNGDESQLQKLAKG

SEQ ID NO: 53 - protein, 208 aa, Westerdykella sp
AVSGMDISHYQGTNYNFAGAYSSGARFVIIKATEGTTYTDPQFSANYIAATNAGFIRGGYHFARPADSTGAAQAKYFVSHGGGWSSDGITLPGMLDLEYGSSSACHGLSVSAMNTWIASFINQYRSLTGAYPMIYTTADWWKTCTGDSQAWNTKCPLVLARYSSSVGTIPGGWPYQTIWQFNDSYKYGGDSDTFNGDLAGLKRLAKGS

SEQ ID NO: 54 - protein, 207 aa, Stropharia semiglobata
LTYAVDSSTLVSVATYTKAKSQGFTKAIIRGYQEACGSGGAVDPNFVQTYKNARAAGYTDIDMYWFPCNGSTHNCKSYATQIAAIAATFSANSMKIGRIWIDIEKDAAVCNNWNYGTAGNLSQAKALISAIKASGFVYGIYSSPGEWGNIFGSTSVVVDNSAPLWFATWNNVQTLTMGTKFGGWTSAMGHQYTDVSASGQFDLSVFA

SEQ ID NO: 55 - protein, 208 aa, Gelasinospora cratophora
TVQGFDISHYQSSVNFAGAYSSGARFVIIKATEGTTYIDSSFSSHYTGATSAGLIRGGYHFAHPDSSTGAAQADYFLAHGGGWSADGITLPGMIDLESVSGKATCFGLSTSAMVSWIKSFSDRYYAKTGRYPMIYTNYSWWNQCTGNSASFAATNPLVLARWSSTVGTLPGGWSVQTIWQNADTYTYGGDSDVFNGSLDRLKALAKGS

SEQ ID NO: 56 - protein, 207 aa, Deconica coprophila
LVHAVDSSSLVSTATFSKAKSEGFTKAVIRGYQEACGSGGRVDPNFVQTYKNARAAGITNIDTYWYPCNGSGNSCKSYAKQIAGISATFNAHSMKIGRIWIDIEKDSICNNWNYGTSGNRDHAKKLITAIKNSGFKYGIYSSPGEWSTIFGSESFDLDSGAPLWFATWNNVQTLTLGTHFGGWTSAHGHQYTDKSASGQFDLNVFSS

SEQ ID NO: 57 - protein, 208 aa, Rhizomucor pusillus
YETGVDVSALTSTSAWSCAKKLGYDHAIVRCYIEAYGGNPGGKIDSNCFQNYKNAKAGGFTSVDIYMFPCTGRSTCKSPAAQVKEVVDYVGSNKMTVGRLWLDVEIDPSANNWPSASSARSTLKSFKSALDSTGWKYGIYSSASQWSQITGSSSWELDSSLPLWYAHYDASLSFSDFSPFGGWTKPTIKQYAGSVSFCSAGWDKNYYG

SEQ ID NO: 58 - protein, 207 aa, Stropharia semiglobata
LVYGVDSSTLVSTATYSKAKSEGFTKAIIRGYQEACGSGGRVDPNFVATYKNARAAGITDIDMYWFPCNGSGNSCKSYAKQLSEIANVFSANSMKIGTIWIDFEKDSGCNNWNYGTTGNLNHAKALISAIKATGFKFGIYSSPGEWGTLFGSTGVVLDSSAPLWFATWNNVKTLTLGTHFGGWTKAVGHQYTDVSASGQFDLNVFAN

SEQ ID NO: 59 - protein, 207 aa, Stropharia semiglobata
LVYGVDSSTLVSTATYKKAKSEGFTKAIIRGYQEACGSGGRVDPNFVATYKNARAAGITDIDMYWFPCNGSGNSCKSYAKQLSEIANVFSANSMKIGTIWIDFEKDSGCNNWNYGTTGNLNHAKALISAIKATGFKFGIYSSPGEWGTLFGSTGVVLDSSAPLWFATWNNVKTLTLGTHFGGWTTAAGHQYTDVSSSGQFDLNVFAN

SEQ ID NO: 60 - protein, 233 aa, Trametes cinnabarina
MKLSTTALLAIAVAVASASPTPEKRANPKGIDVSAYQPNINWSTVKANGISFAYIKATEGTTYTNPDFSSQYTGATNAGLIRGGYHFAHPDSSSGATQAKYFLAHGGGWTSDGITLPGALDIEYNPSGAECYGLSASAMVSWIKDFSNTYHSSTGVYPVIYTTTDWWTTCTGNSAAFASTNPLWIARYASSIGTLPAGWSYTTFWQYADSGPNPGDQDEFNGSMAGLKQLALG

SEQ ID NO: 61 - protein, 218 aa, Aspergillus fumigatus
LPSQPEARATTVQGFDISNHQKSVNFEAAKKDGAQFVMIKATEGTTYKDTVFNSHYTGATKAGLLRGGYHFARPDKSTGSTQAKFFLKNGGGWSDDNRTLPGMLDIEYNPYGATCYGLSHSQMVAWIHDFVNEYHHATSRWPMIYTTADWWNRCTGNAKGFGDKCPLVLAAYSSSPPKTIPGDWKTWTIWQNSDKYKHGGDSDKFNGPMTQLRKLASG

SEQ ID NO: 62 - protein, 208 aa, Trichoderma reesei
TVPGFDISHYQATVDFAKAYADGARFVIIKATEGTTYTDPSFSDHYTKATNAGFIRGGYHFAQPASSSGAAQANYFLKHGGGWSADGITLPGMLDLEYAPSGDSCYGLSASAMVSWINDFVNTYHAATTQYPLIYTSTSWWQLCTGNNGSFGSKSPLVIARYASSVGALPNGWSVYTIWQNSDASPWGGDNDIFNGNLAQLQKIARGS

SEQ ID NO: 63 - protein, 215 aa, Trametes cinnabarina
SPTPEKRANPKGIDVSAYQPNINWSTVKANGISFAYIKATEGTTYTNPDFSSQYTGATNAGLIRGGYHFAHPDSSSGATQAKYFLAHGGGWTSDGITLPGALDIEYNPSGAECYGLSASAMVSWIKDFSNTYHSSTGVYPVIYTTTDWWTTCTGNSAAFASTNPLWIARYASSIGTLPAGWSYTTFWQYADSGPNPGDQDEFNGSMAGLKQLALG

SEQ ID NO: 64 - protein, 245 aa, Trichophaea saccata
YPVKTDLHCRSSPSTSASIVRTYSSGTEVQIQCQTTGTSVQGSNVWDKTQHGCYVADYYVKTGHSGIFTTKCGSSSGGGSCKPPPINAATVALIKEFEGFVPKPAPDPIGLPTVGYGHLCKTKGCKEVPYSFPLTQETATKLLQSDIKTFTSCVSNYVKDSVKLNDNQYGALASWAFNVGCGNVQTSSLIKRLNAGENPNTVAAQELPKWKYAGGKVMPGLVRRRNAEVALFKKPSSVQAHPPKC

SEQ ID NO: 65 - protein, 249 aa, Chaetomium thermophilum
PASAYAITGDNVNCRSGPGTSYAVKKVYKKGTDVKISCQTTGTNINGNNLWDKTSDGCYVSDYYVKTGSNGYVTSKCSSSGGSTCAAPKSNQATVDLIAEFEGFRANIYTDAAGYATVGYGHKCQKAKCAEVKYKIPLSKADGKKLLADDMRSFEVCITNMLNSKAKLNYNQFGALVSWSFNVGCGAAKSSTLIKRLNNGENVNKVLSEELPKWNKAGGKVLQGLVRRRAAEVALAKKSGSSQALPVKC

SEQ ID NO: 66 - protein, 248 aa, Trichoderma harzianum
YPITGDVVNCRTGPGTSYAIKKSYKKNQDISISCQTAGTSVNGNSIWDKTADGCYVADYYVKTGSSGYVTKKCTASSGGGSSSSYCKTINSAGVDLIAKWEGFVASPKPDPIGLPTVGYGHLCQQKNCREVKYKFPLTKTTAKELLLDDLPKYTKCLADYLNDKPKLNANQWAALTSWVFNVGCGNAKTSTLVKRLNNGEAANTVAAEELPKWRMAGGKVLPGLEARRKDEVKLFKTASSKQAYPKCQ

SEQ ID NO: 67 - protein, 245 aa, Trichophaea minuta
YPAKVDLRCRSSPSTSASVVRTYSKGSEIQISCQTTGTSVEGSNVWDKTQHGCYVADYYVKTGHSGIFTTKCGSSSGGGSCKPPPINAATVALIKEFEGFVAKPAPDPIGLPTVGYGHLCKTKGCKEVPYSFPLTQTTATKLLQSDIKTFTSCVSNYVKDSVKLNDNQFGALSSWAFNVGCGNIQTSSLIKRLNAGENPNTVAAQELPKWKYAGGKVLPGLVRRRKAEVALFKKPSSVQAHPPKC

SEQ ID NO: 68 - protein, 249 aa, Chaetomium sp. ZY287
YKISGSSVNCRSGPGTNYPVKKTYANGDEVTISCQTTGTNVEGNNIWDKTQHGCYVADKYVKTGKDGFVTKKCGSSGGGGGGKTCKAPKSNAATVDLIASFEGFRANIYTDATGHPTVGYGHMCTKSRCAEVKYKIPLSKADGKKLLADDMAKFEKCIKEMLNSKAKLNLNQYGALVSWSFNVGCGAAKGSQLVSRLNKGENPNTVLSNELPKWVHGNGKVLPGLVRRRNAEIALAKKSGSGAALPVKC

SEQ ID NO: 69 - protein, 245 aa, Mortierella sp. ZY002
YPITGADALHCRSGPGTSYPIQKTLRPPQDIKIQCQEPGTVVNGVSLWDKTQFGCYVSDYYVKTGTGNYVAPRCNSGGSSSACTGLNDAGINLIKEFEGFVPRPAPDPIGLPTVGYGHLCQTKGCGEVKYSFPLTTATATALLKDDLPKYTSCLAKALNGKPKLNKNQWAALASWTFNVGCGNMKSSSLITRLNAGQNPNTVATEELPKWKLAGGKVLPGLVRRRAAEVKLFKTANSSQGYPKCA

SEQ ID NO: 70 - protein, 247 aa, Metarhizium sp. XZ2431
YPVSADSLNCRAEPNTSSAIKTTYKKGEDVKISCQTEGPSINGNTIWDKTQDGCYVADYYVKTGSSGYVTGKCGGSSPPSGSGFCKTVNKAGLDLITKWEGFVSSPRGDPIGLPTVGYGHLCQKKGCAEVKYKFPLTKATALQLLNDDLPKYTGCLGKLLNSKVKLNDNQWAALTSWVFNVGCGNAQSSSLVRRLNNGENPNTVAPSELPKWKMAGGKVLEGLVKRRADEVRLFKVSSSKGAFPKCQ

SEQ ID NO: 71 - protein, 250 aa, Geomyces auratus
AFPITGSTVNCRTGPGTSHGVKTSYKKGHEVTVSCQTGGTSVNGNSIWDKTSDGCYVADYYVKTGSSGYVKPKCGSSSGGGGGSSCGAPKSNAATVNLIAEFEGFVSHVYTDATGHPTVGYGHLCSNSKCSGIGYSIPISKANAKKLLAKDMAIAEKCITAMINKSRTLNLNQYGALVSWAFNEGCGAAKSSTLIKRINNGEKPSTVIPQELPKWVYGGSSVLPGLVRRRNAEIALAKKATSSKALPAHC

SEQ ID NO: 72 - protein, 240 aa, Ilyonectria rufa
YKITGDNVNCRSGPGTSYSVKRSFKKGTDVTLSCQTTGENVLGTSIWDKTSYGCYVSDYYVKTGSSGFVVKKCGTCGAPKSNAATVNLISDFEGFRANIYKDAAGYPTVGYGHLCSNSRCTDVPYSIPLSKANGKNLLATDMTKFEKCITAMVSSSVTLNKNQYGALVSWAFNMGCGATKTSTLIKRLNQGQNVNTVLSTELPKWVYAGGKKLNGLVRRRNAEIALAKKKTTEKALPNKC

SEQ ID NO: 73 - protein, 157 aa, Ajellomyces capsulatus
PHVNKATLALIKEFEGFVPRPEPDPIGLPTVGYGHLCKTKGCKEVKFPLSKGTATTLLKKDLRSFQQAITLSTKTAVKLNANQYGALVSWAYNVGPNAARSSSLISRLNQGEDPNQVIAQELPKWRLAGGKVFEGLVRRRKAEVKLAKTPTKSKALP

SEQ ID NO: 74 - protein, 159 aa, Coprinopsis cinerea
INKKTLDLLKEFEGWAASPYKDVAGYPTVGYGHKCSKNDCSELGYKFPMTKAQGEELLAKDVKGFEKCISDYINDTIKLNDNQYGALVSWSFNVGCGAAKDSTLISRLNKGDSPNTVAGEELPRWNKAGGKVVDGLTNRRKKEVELFKTSSTVIAHPPC

SEQ ID NO: 75 - protein, 154 aa, Aspergillus terreus
GKLLRRGISDAAVELIGSLEGFRPDFYYINGHKTVGYGHDCVAKQDCDSIDTPLTKEEGAALLKKDLAGYENCVCEMDNAKYLNANQYGALVSFAYNSGCGGVQSWWHGAMEQKNFKGICSALPNTNTLGGELSSRRAKEGAFCAKPTNQTSGC

SEQ ID NO: 76 - protein, 166 aa, Aspergillus terreus
ACSGPNVNEATIKLMKGYESWEADVYDDGYGNPTVGYGHLCDDWSCSDVSYDIPLSESDGEKLFAEDIVAYQNGVVAALSDDVTLNDNQYGALVSWCFNVGTGAVAESTLAKRLNNGEDPDTVAEEELPKWVYANGAPSEGLKNRRAAELKLFTTSSDTEALPVDC

SEQ ID NO: 77 - protein, 154 aa, Aspergillus oryzae
ATVVRRGASAATVSLIGEVEGFRADFYDMMGHKTIGYGHDCVAKQDCDSIKAPISNAQGDEILQKDLAGFEQCVCALPNAKALNANQYGALVSYAFNTGCGGLQQAWTAAMTSKNFDSICADLPHTNTLNGVLDNRRKKEAALCSTPTTQMCGC

SEQ ID NO: 78 - protein, 163 aa, Aspergillus oryzae
GPPVNQNGLNLIKSFESFQPSVYDDGFGNPTIGYGHLCGDATCSEVTYPKPLSEADASRLLADDLVSYQDALTNALADPVTLNDNQYAALVSWTFNIGNGNMQKSDLVARMNKGENVATVAHDELPQWNKANGQVVNGLTRRRKAELDLFDAPAIYGALPVPC

SEQ ID NO: 79 - protein, 162 aa, Emericella nidulans
PDVNTATTDLMKAFESWEPDVYDDGYGNPTIGYGHLCSDWSCSDVAYDIPLSEEDGVKLFAEDIAVYQDGVVSALDSSVTLNDNQYGALVSWCYNVGAGAVAESTLAARLNAGEDPNTVAEEELIKWVYANGEVSEGLKRRRNAEIELFQTSSDGEALPVSC

SEQ ID NO: 80 - protein, 159 aa, Laccaria bicolor
ISSATVNLIKGSESLVPIPSPDPIGLLTVGYGHKCLKPQCSEVTFPFPLSSSTASQLFAQDMTQYINCLHRSISKSVVLNDNQFGALVSWTYNAGCEGMGTSTLVKRLNNGEDPNTVVAQELPKWNIAKKKISKGLVNRRNREISFFQTPSNVVAHPLC

SEQ ID NO: 81 - protein, 160 aa, Laccaria bicolor
PPANADTINLIERFEGFVPSPRPDPIGLPTVGYGHLCKTKGCSEVPFKFPVTKANAVTLLHSDLTTFQNCVNSDIKRSVHLNDNQYGALVSWAYNVGCGNIKTSSLVRRLNAGEDPNTVAAQELPQWNKGGGKVLPGLVRRRAEEVKLFKTPSSVSAHPC

SEQ ID NO: 82 - protein, 162 aa, Laccaria bicolor
PAVNAATIALIKKFEGFVASPSPDPIGLPTVGYGHLCQTKNCAEVPFSFPLTEAEASTLLNSDLKTYEACITKDIVSSVRLNDNQYGALCSWAFNEGCGAAGSSTLIARLNAGQDPDAVAAQELPKWDIAGGKVLQGLVNRRAAEVALFKTPSSVIAHPPHC

SEQ ID NO: 83 - protein, 163 aa, Aspergillus flavus; identical to SEQ ID NO: 78

SEQ ID NO: 84 - protein, 157 aa, Ajellomyces capsulatus
PNVNKATLDLIKEFEGFVPRPEPDPIGLPTVGYGHLCKTKGCKEVKFPLSKETATTLLKKDLRSFQQAITLSTKTAVKLNANQYGALVSWAYNVGPNAARSSSLISRLNKGEDPNKVIAQELPKWRLAGGKVFKGLVRRRKAEVKLAKTPTKSKALP

SEQ ID NO: 85 - protein, 162 aa, Arthroderma otae
PDVNDETIALIKHFEGFVPRPAPDPIGLPTVGYGHLCRTKGCGEVPFPFPLTEESATELLHQDVKSPQQSITLSTADSVVLNANQYGALVSWAFNVGGGAAKKSSLIKRLNQGQDVDTVIREELPLWNKAGGHVLPGLVRRRKAEVELAMEHTDDGALPVDC

SEQ ID NO: 86 - protein, 162 aa, Arthroderma otae
PDVNAATISLVKEFERFVPSPSPDPIGLPTVGYGHLCQSKNCGEVGFPFPLTEDTATQLLAQDIKAPQQTITLKTVNGVHLNENQYGALVSWTFNVGPGNVATSSLLKRLNALEDVNTVLREELPKWKYAGGKVLPGLVRRRAAEVALGETPSNVGALPVDC

SEQ ID NO: 87 - protein, 160 aa, Ajellomyces dermatitidis
PNVNKATLALIKEFEGFVPRPAPDPIGLPTVGYGHLCKTKGCKEVKFPLTKKTATALLKKDLRSFQQAITLSTKKAVKLNANQYGALVSWAYNVGPNAARSSSLIRRLNRGENPNKVIAQELPKWRLAGGKVFKGLVRRRKAEVKLAKTPTKKKALPVKC

SEQ ID NO: 88 - protein, 157 aa, Ajellomyces capsulatus
PNVNKATLALIKEFEGFVPRPEPDPIGLPTVGYGHLCKTKGCKEVKFPLSKGTATTLLKKDLRSFQQAITLSTKTAVKLNANQYGALVSWAYNVGPNAARSSSLISRLNKGEDPNKVIAQELPKWRLAGGKVFKGLVRRRKAEVKLAKTPTKSKALP

SEQ ID NO: 89 - protein, 163 aa, Hypocrea jecorina
KTINGAGVDLIAKWEGFVASPKPDPIGLPTVGYGHLCQQKNCAEVKYKFPLTKTTAKELLLDDLPKYTKCLADVLNSKPKLNANQWAALSSWVFNVGCGNAKTSTLVKRLNNGEAPNTVAAQELPKWRMAGGKVMPGLEARRKDEVKLFKTASSKEAYPKCQA

SEQ ID NO: 90 - protein, 162 aa, Arthroderma benhamiae
PDVNPATIALIKEFEGFVPAPAPDPVGLPTVGYGHLCQSKNCGEVGFPFPLTEDTATQLLIQDVKAPQQTITLKTADGVHLNENQYGALVSWTFNVGPGNVATSSLLQRLNALEDVNTVLREELPQWKYGGGKVLPGLVRRRAAEVALGETASDVPALPVAC

SEQ ID NO: 91 - protein, 162 aa, Trichophyton verrucosum; identical to SEQ ID NO: 90

SEQ ID NO: 92 - protein, 162 aa, Trichophyton verrucosum
PDVNDETIALIKHFEGFVPRPAPDPIGLPTVGYGHLCRTNGCSEVPFSFPLTEETATELLMQDVKSPQQSITLSTTDQVVLNANQYGALVSWAYNVGGDAAKKSSLISRLNQGQDVDVVIREELPLWNKAGGHVLPGLVRRRAAEVELASENTDQPALPVDC

SEQ ID NO: 93 - protein, 161 aa, Coprinopsis cinerea
NTATVNLIQEFEGFVASPEPDPIGLPTVGFGHLCRQPNCAEVTAQGLSFPLSRAQAEQLLQSDVQTFTNCLARFIDDSVVLNENQFGALTSWAFNVGCGNVQRSTLRRRLNAGQDPNTVAAQELPRFNRAGGRVLNGLTRRRNAEVALFQTPSNTVALPVC

SEQ ID NO: 94 - protein, 162 aa, Arthroderma gypseum
PDVNAATIALVKEFEGFVPSPAPDPIGLPTVGYGHLCQSKNCGEVGFPFPLTEDTATQLLSQDIKAPQQTITLKTADGVHLNENQYGALVSWTFNVGPGNVATSSLLKRLNALEDVNTVLREELPKWKYAGGKVLPGLVRRRAAEVALGETPSDVPALPVDC

SEQ ID NO: 95 - protein, 162 aa, Arthroderma gypseum
PDVNEATISLIKHFEGFVPRPAPDPIGLPTVGYGHACRTKGCAEVPFPFPLTEDTATELLMQDVKSFQQSITLSTTDEVVLNANEYGALVSWAFNIGGGAAKKSSLIRRLNQGQDVNTVLREELPLWNKAGGKVLPGLVRRRAAEVELASEHTDEPALPVDC

SEQ ID NO: 96 - protein, 162 aa, Hypocrea virens
KTINGAGVDLIAKWEGFVASPKPDPIGLPTVGYGHLCQQKNCREVKYKFPLTKTTAKELLLDDLPKYTKCLADYLNTKPKLNDNQWAALTSWVFNVGCGNAKTSTLVKRLNNGEAANTVAAEELPKWRMAGGKVLPGLEARRKDEVKLFKTASSKQAYPKCQ

SEQ ID NO: 97 - protein, 162 aa, Agaricus bisporus
PRVNSATISLIKEFEGFVKSPSPDPIGLPTVGFGHLCKSKGCAEVPYKFPLTEANAGKLLQTDIKSFTKCVSDNIKDAVKLNANQFGALSSWAFNVGCGNVKASALVARLNRGEKPNTVAAEELPKWRLAGGKVLKGLVRRRAAEVKLFKTASKAIAHPPKC

SEQ ID NO: 98 - protein, 163 aa, Metarhizium robertsii
KTLNKAGTDLITRWEGFVDRPKPDPIGLPTVGYGHLCQKKSCAEVKYTFPLTKATALQLLNDDLPSYTKCLGKVLDAGKVKLNENQWAALTSWVFNVGCGAAQSSSLVKRLNRGENANTVASEELPKWKMGGGRVLPGLVKRRADEVALFKIASSRSAFPQCQ

SEQ ID NO: 99 - protein, 157 aa, Ajellomyces capsulatus
PNVNKATLALIKEFEGFVPRPEPDPIGLPTVGYGHLCKTKGCKEVKFPLSKGTATTLLKKDLRSFQQAITLSTKTAVKLNANQYGALVSWAYNVGPNAARSSSLISRLNKGEDPNKVIAQELPKWRLASGKVFKGLVRRRKAEVKLAKTPTKSKALP

SEQ ID NO: 100 - protein, 162 aa, Trichophyton tonsurans
PDVNDETIALIKHFEGFVPRPAPDPIGLPTVGYGHLCRTKGCSEVPFPFPLTEETATELLMQDVKSPQQSITLSTTDQVVLNANQYGALVSWAYNVGGSAAKKSSLISRLNQGQDVDAVIREELPLWNKAGGHVLSGLVRRRAAEVELASEHTDQPALPVDC

SEQ ID NO: 101 - protein, 159 aa, Trichophyton equinum
PDVNPATIALIKEFEGFVPSPAPDPVGLPTVGYGHLCQSKNCGEVGFPFPLTEDTATQLLLQDVKAPQQTITLKTADGVHLNENQYGALVSWTFNVGPGNVATSSLLQRLNALEDVNTVLREELPQWKYGGGKVLPGLVRRRAAEVALGETPSNVAALP

SEQ ID NO: 102 - protein, 162 aa, Trichophyton rubrum; identical to SEQ ID NO: 90

SEQ ID NO: 103 - protein, 161 aa, Trichophyton rubrum
NVNDETIGLIKHFEGFVLRPAPDPIGLPTVGYGHLCRTKGCSEVSFPFFLTEETATELLIQDVKSSQQSITLSTTDQVVFNANQSGALVSWAYTVGGATAKKSSLISRLNREQDVDAVIREELPLWNKAGRHVLPGQVRRRAAEVELASGHTDQPPLLVDC

SEQ ID NO: 104 - protein, 150 aa, Pleurotus ostreatus
MIKSFESFVPSPAPDPVGKLTVGYGHKCIQPGCSEAGPFPLTEAGAVALMHRDLRIATTCLSPAISSTVRLNDNQFGALADWAFNVGCGAMRRSTLVSRLNSGENPNTVAAQELPKWNVAEGHVSNGLIRRRAAEVALFQTASSVIAHPC

SEQ ID NO: 105 - protein, 150 aa, Pleurotus ostreatus
LIKEFEGFVARPAPDPIGLPTVGYGHLCQTTSCSEAGAFPLTEARATTLLLSDSRVATSCLNTAISRNVRLNANQFGALTSWTFNVGCGNMRSSSLLSRLNAGEAPNTVAAQELPKWNKAGGQVLAGLTRRRAAEVVLFQTASSVIAHPC

SEQ ID NO: 106 - protein, 150 aa, Pleurotus ostreatus
LIKSSEGFVPSPAPDPIGLPTVGYGHLCQTSSCSEAGPFPLTEARATTLLLADSRTATSCLNTAISSSVRLNDNQFGALTSWTFNVGCANMRSSTLVSRLNAGETPNTVAAQELPRWNLAGGVVQPGLVTRRANEVKLFQTASSVVAHPC

SEQ ID NO: 107 - protein, 146 aa, Serratia marcescens
ELQTSEAGLRLIADLEGCRLSPYQCSAGVWTQGIGHTAGVIPGKAIDEHKAAMDLVDDVRRTERGMAACLPDTLSQQTYDAAIAFAFNVGVSAACHSTLVALLQQRQWRQACDQLPRWVYVNGKKNKGLEQRRAMERALCLQGIAS

SEQ ID NO: 108 - protein, 162 aa, Galerina marginata
PEVNAATISLIKKFEGFVSKPAPDPIGLPTVGYGHLCKTTGCAEVPFSFPLTEAEATTLLNTDLKTFTACITKDISSKIKLNDNQYGALSSWAFNEGCGNVGSSTLIARLNAGDNPNTVAAQELPKWDIAGGMVLQGLVNRRVAEVKLFQTPSSVIAHPPQC

SEQ ID NO: 109 - protein, 161 aa, Galerina marginata
TPPNAATVSLIKSFEGFVASPKPDPIGLPTAGFGHKCVKANCAEVPFSFPLSQDTATQLLQSDAQKFVTCLHGLISKKVTLNDNQFGALTSFAFNLGCGAVQSSTLLKRLNNGEDPNTVAAAEIPRFNKAGGKVSSGLARRRAAEVQLFQTPSSTTAQPLC

SEQ ID NO: 110 - protein, 163 aa, Agaricus bisporus
PRVNSATISLIKEFEGFVKSPSPDPIGLPTVGFGHLCKSKGCAEVPYKFPLTEANAGKLLQTDIKSFTKCVSDNIKDAVKLNANQFGALSSWAFNVGCGNVKASALVARLNRGEKPNTVAAEELPKWRLAGGKVLKGLVRRRAAEVKLFKTASSAIAHPPKCS

SEQ ID NO: 111 - protein, 167 aa, Trichosporon asahii
VNADGIALIQEFESFQPRPYKDPKGLWTVGYGHLCANGGKDSTCSGTGFKYPLTLATAGELLKKDIPRYTKCLRDNLNEDKVKLNKNQWAALSSFVFNLGCGNFQRSDLMARLNKGEDVNTVIAAEFPRWNKADGAVLTGLVRRRAAEVALAKKTSHGTSKAFPTCT

SEQ ID NO: 112 - protein, 164 aa, Trichosporon asahii
CPSINDAGIALIKEFEGFFKNPYKDPVGLWTVGYGHLCANGGKDSSCSGTGFKYPLTEATATELLKKDLPSYTSCFPKYLTSGAKLNKNQYAALTSFTFNLGCGVLKDFAGRLNKGEDASTVFAQEFPKYVHAGGNVLQGLVRRRNAEVALAKKAGSTEAWPKC

SEQ ID NO: 113 - protein, 160 aa, Trichosporon asahii
INDAGVELIKSFEGCVANPYQDAGGKWTVGYGHLCSGGDDSTCSDTGFSYPLTEETATELFKRDLPNYVSCMPQYLTDGAKLNKNQWAALTSFCYNLGCGILSDFAGRLNAGEDANVVIGEEFPKYTLAEGVELEGTGAGGDEEVALAQSPGSTEAWPNC

SEQ ID NO: 114 - protein, 168 aa, Trichosporon asahii
VNADGIALIQEFESFQPRPYKDPKGLWTVGYGHLCANGGKDSTCSGTGFKYPLTLATAGELLKKDIPRYTKCLRDNLNEDKVKLNKNQWAALSSFVFNLGCGNFQRSDLMARLNKGEDVNTVIAAEFPRWNKADGAVLTGLVRRRAAEVALAKKTSHGTSKAFPTAPK

SEQ ID NO: 115 - protein, 131 aa, Rhizophagus irregularis
MSLFKENFYDDPVGITTIGYGHNCKANKDSDKIKAPISIKEAEELLRKDLVKFEDYVNKQVPELNSNQFSAVVSFAYNLGCDKLRTSILLKKLKAGDTQGASEEFGRWVHAKRKRLPGLVRRREDERQLFL

SEQ ID NO: 116 - protein, 141 aa, Rhizophagus irregularis
VNKEGLDLIEGFEGFYPNFYKDPVGIKTIGYGHACHVHDCSKIQAPISLAEGETLLKSDLAVFESCVESLTRTNLNPDQFSALVSFTFNLGCGAYQKSTLRRKLNAGDTKGASLEFAKWVYGGGKKLPGLVRRRNAERDLF

SEQ ID NO: 117 - protein, 105 aa, Rhizophagus irregularis
INKAGLKLIKKFEGFRSRFYVDKGIITIGYGHACHVYDCSKIHPPISRAKGEALLKKDLVVFEKCVDSLTQIKLNSNQFSALVSFTYNLCCEAYRRSTLRRKLNA

SEQ ID NO: 118 - protein, 155 aa, Coniosporium apollinis
PTVNDGTIIMLKELEGFSATPYLDVNKAAIGYGHQCNEPECAGLSPPITEVEATELMLQDLRTYRDCLTAKLGSVTLNENQYGALASWTFNVGCGNMRGSTLVIRLLAGEDPNTVAADELPKWRLVNGQVSQALVRRREKEIALFKTESGVQVLP

SEQ ID NO: 119 - protein, 114 aa, Rhizophagus irregularis
TIGYGHNCEANNDGDKINAPISIAQAEDLLRRDLSMYENYVNSQVPGLNSNQFSALVSFTFNVGCGNLGSSTLLKKLKAGDTQGAANEFGRWVYANKKKLPGLIRRREAEKRLF

SEQ ID NO: 120 - protein, 163 aa, Penicillium roqueforti
GPAVNTNGLDLIKSFESFQANVYDDGYGNPTIGYGHLCSDSTCSEVTFSKPLTEDTASQLLAKDLVTYQNGVTNALATAVTLNDNQYAALVSWTFNVGVGNMQSSSLVSRMNAGENVETVASEELPKWNKANGAVVAGLTRRRADEVKLFEEASQTKALPVGC

SEQ ID NO: 121 - protein, 163 aa, Aspergillus ruber
GPPANIPTLDLLKGFETMQPDPYDDGFGNPTIGYGHLCTNKACSDVPFSKPLSEDSATRLLQGDLTSAQDAVTNALADPVTLNDNQYGALISWTFNVGNGNMKSSDLVRLMNAGEEIVAVANNELPLWNKANGKVVNGLVRRRKAEVDLFNTPSNFGALPVPC

SEQ ID NO: 122 - protein, 162 aa, Pyronema omphalodes
INAATISLIKSFEGFVPSPKPDPIGLPTVGYGHLCKKKGCAEVKYKFPLTEATAAQLLQDDAYTFRKCVAAAIKDSVTLTDNQYGALVSWAFNVGCGGVQTSTLVKRLNRGENKNIVASQELIKWNKAGNPPKPMNGLTRRRNAEIALFKKASSVQAHPPKC

SEQ ID NO: 123 - protein, 161 aa, Pyronema omphalodes
PPVNTATVNLIKEFEGFVPSPAPDPIGLPTVGYGHLCKQTNCAEVPYPFPLTTTTAAALLQTDLKTYTKCISDYIVDSVRLNDNQYGALSSWAFNVGCGNAKTSTLISRLNAGQNPNTVASEELPKWNKAGGSVLPGLTRRRAAEVTLFKTASTKIAHPAC

SEQ ID NO: 124 - protein, 144 aa, Trichophyton interdigitale
PDVNDETIALIKHFEGFVPRPAPDPIGLPTVGYGHLCRTKGCSEVPFPFPLTEETATELLMQDVKSPQQSITLSTTDQVVLNANQYGALVSWAYNVGGSAAKKSSLISRLNQGQDVDAVIREELPLWNKAGGHVLPGLVRRRAA

SEQ ID NO: 125 - protein, 134 aa, Rhizophagus irregularis
INKEGLALIERFEGFSPNFYKDPVGIKTIGYGHAYHVNDCSKIRPPISRAEGEALLKKDLARFEKCVESLTRVKLNSNQFSALCSFTFNIGCGAYQKSTLRRKLNAGDTKGASLEYRKWVYGGGKPLPGLVKRR

SEQ ID NO: 126 - protein, 141 aa, Rhizophagus irregularis; identical to SEQ ID NO: 116

SEQ ID NO: 127 - protein, 163 aa, Metarhizium anisopliae
KTLNKAGTDLITRWEGFVDRPQPDPIGLPTVGYGHLCQKKSCAEVKYTFPLTKATALQLLNDDLPSYTKCLGKVLDAGKVKLNENQWAALTSWVFNVGCGAAQSSSLVKRLNRGENANTVASEELPKWKMGGGRVLPGLVKRRADEVALFKMASSRSAFPQCQ

SEQ ID NO: 128 - protein, 132 aa, Beauveria bassiana
MLTDLEGVRYTPYYDVAGVLTVCYGHTGADIIKTKTYSATECQAMLDKDLVPFARSVERSVKVPTTEYQKAALISFSYNVGVTAFERSSLLRQLNAGNYQAACDGLRQWTYAGGKQWKGLMNRRDIEREVCM

SEQ ID NO: 129 - protein, 137 aa, Beauveria bassiana
GVDLIKSFEGLRLAKYKDAVGKWTIGYGHLILATENYDRPLTEQEAENLLRSDLALTERGVYRQVSMALNQNQFDALVAFAFNVGLGNLQNSTLLRLLNQGNYSAAADEFLRWNKAGGNVLAGLTRRREAERKLFLS

SEQ ID NO: 130 - protein, 138 aa, Beauveria bassiana
LLPELEGVSYTPYYDVAGVLTVCYGHTGQDIIPDKTYTLSECRRWLDQDLRPAAQVVSRAVTVPVSEYQRAALISFTYNVGTAAFLRSSVLRTLNAGDYEQACAGLKKWIWAGGKPWQGLINRREVEYQLCTWPEPEK

SEQ ID NO: 131 - protein, 163 aa, Metarhizium guizhouense
KTLNKAGTDLVTRWEGFVDRPKPDPIGLPTVGYGHLCQKKSCAEVKYTFPLTKTTALQLLNDDLPSYTKCLGEVLDASKVKLNENQWAALTSWVFNVGCGAAQSSSLVKRLNHGENANTVASEELPKWKMGGGRVLPGLVKRRADEVALFKIASSRSAFPQCQ

SEQ ID NO: 132 - protein, 163 aa, Metarhizium majus
KTLNKAGTDLVTRWEGFVDRPKPDPIGLPTVGYGHLCQKKSCAEVKYTFPLTKATALQLLNDDLPNYTKCLGEVLDASKVKLNENQWAALTSWVFNVGCGAAKSSSLVKRLNHGENANTVASEELPKWRMGGGKVLPGLVKRRADEVALFKIASSRSAFPQCQ

SEQ ID NO: 133 - protein, 163 aa, Metarhizium brunneum
KTLNKAGTDLITRWEGFVDRPKPDPIGLPTVGYGHLCQKKGCAEVKYTFPLTKATALQLLNDDLPSYTKCLGRALDAGKVKLNENQWAALTSWVFNVGCGAAQSSSLVKRLNRGENANTVASEELPKWKMGGGRVLPGLVKRRADEVGLFKIASSRSAFPQCQ

SEQ ID NO: 134 - protein, 163 aa, Magnaporthe oryzae
PKLNQASLDLVKEFEGWFPDIYLDPVGLPTVGYGHLCSNPTCSEVPYPIPLSVANGEALLQSDLGIARRCLSADLVDSVVLNPNQYGALVSWVFNMGCGAQKSSTLTARLNAGEDKSVVARQELPRWVYAGGQVLNGLVRRRAAEVALFDTPAEGVAHPPRPC

SEQ ID NO: 135 - protein, 162 aa, Coprinopsis cinerea
TTVNARTVREIKSSEGFVKSPAPDPIGLPTVGYGHLCKTKGCAEVPYKFPLTDAQATSLLKSDLKTFQNCISKDLRDTVRLNENQYGALVSWAFNVGCRATGSSTLIARLNRGDNPAKVAEEELPKWNKANGKVLQGLVNRRKREIAMFKTPSKVIHHPPKC

SEQ ID NO: 136 - protein, 162 aa, Coprinopsis cinerea
TNVNSKTVEHIKQWEGFVKSPAPDPIGLPTVGYGHLCKTKGCSEVPYKFPLTEAQATSLLKTDLKTFQNCISSQLKDSVRLNANQYGALVSWAFNVGCGNTSGSALISRLNKGESPNTVASQELPKWNKAGGKVLQGLVNRRKAEVTLFKTSSSVIHHPPTC

SEQ ID NO: 137 - protein, 162 aa, Coprinopsis cinerea
SPVNSRTVQEIKNSEGFVRSPAPDPIGLPTVGYGHLCKNKGCSEVPYSFPLTEAQATSLLMTDLKTFQKCISDQINDSIRLNENQYGALVSWAFNVGCGNTASSALISRLNKGESPNKVAEEELPRWKYAGGQVLPGLVARRNREIALFKTASSVVGHPPRC

SEQ ID NO: 138 - protein, 162 aa, Chaetomium globosum
PKSNSATVDLIAKSEGFRANVYNDPAGHPTVGYGHLCTKAKCAEIKYKIPLSTTDGKKLLADDMKKFEKCITAMLNSKAKLNLNQYGALVSWSFNVGCGAAQGSQLVKRLNKGENVNTVLSNELPKWVNAGGKKLPGLVTRRNNEIALAKKSGSGAALPVKC

SEQ ID NO: 139 - protein, 162 aa, Nectria haematococca
PKSNQATVNLIASFEGFRANIYKDAAGYPTVGYGHLCSNSKCTDVKYSIPLSQANGKKLLASDMAKFEKCITAMVKSNVKLNKNQYGALVSWSFNNGCGAAKTSTLIKRLNKGEAPNTVISQELPKWVYAGGKKLNGLVRRRKAEVALAKKATTEKALPKSC

SEQ ID NO: 140 - protein, 162 aa, Nectria haematococca
PPVNQATLSLVEEFEGFRADVYIDATGNPTVGYGHLCKQSGCSEIPYPIPLSQADGQKLLQDDIKVAQQCITLDTTSAVVLNANQYGALVSWAFNVGCGASGDSTLIRRLNNGEDANTVASEELPKWNKGNGQPIAGLTRRRAAEVELFKAPTDVGALPVGC

SEQ ID NO: 141 - protein, 162 aa, Nectria haematococca
PSSNQATVDLIGEFEGFVPHIYKDAAGYPTVGYGHLCSNSKCTDVKYPIPLSKTNGKKLLADDMRKFEKCIAKMVSSKVTLNKNEFGALVSWSFNVGCGAAEGSQLIKRLNKGEKPNTVISGELPKWVYAGKRKLPGLVRRRNAEIALAKKATSEKALPVKC

SEQ ID NO: 142 - protein, 155 aa, Verticillium alfalfae
PNVNAATISLITEFEGWYPNIYIDPVGLPTVGYGHLCADSSCSDVRYPIPLSRANGEQLLRDDIAGFQNCITLQTASSVVLNANQYGALVSWAFNVGCGATKTSTLIQRLNAGGNPNTVAAEELPKWNRGGGQVLPGLTRRRAAEVALHRTATSA

SEQ ID NO: 143 - protein, 162 aa, Thielavia terrestris
PKSNQATVNLIAEYEGFVDHVYTDATGHPTVGYGHLCSNSKCSDVPYHIPLSQADGKKLLADDMKKYEKCITAMLTSKAVVNLNQYGALVSWAFNMGCGAAESSTLVKRLNAGENVNTVLSQELPKWVHGDGKVLPGLVRRRNAEIALAKTPTSDKALPVKC

SEQ ID NO: 144 - protein, 162 aa, Thielavia heterothallica
PKSNSATVDLIAKSEGFRSKIYTDATGHATVGYGHMCTKPKCAEVKYKIPLSTADGKKLLAEDMRKFEKCITNMLNSKAVLNYNQFGALVSWSFNVGCGAAQSSQLVKRLNKGENVNKVLSEELPKWVHGGGKVLPGLVTRRKNEVALAKKPGSSKALPVKC

SEQ ID NO: 145 - protein, 162 aa, Coprinopsis cinerea
PNVNTRTLDLIKLSEGFVASPEPDPIGLPTVGYGHLCQRTGCTEVPYSFPLTQAQAHALLISDLRTYQNCIARDIVDSVRLNDNQYGALVSWAFNVGCTNTASSTLIRRLNAGENPNTVAEQELPRWNMAGGQVLPGLVTRRAREVTLFKTASSVIAHPPPC

SEQ ID NO: 146 - protein, 162 aa, Fusarium oxysporum
PSSNQATVDLIGEFEGFVPHIYKDAAGYPTVGYGHLCSNSKCTDVKYAIPLSKANGKKLLADDMRKFEKCIAKMVSSKVTLNKNQFGALVSWSFNLGCGAAEGSQLLKRLNKGEKPNTVISQELPKWVYAGGRKLPGLVRRRNAEVALAKKATSEKALPVKC

SEQ ID NO: 147 - protein, 162 aa, Metarhizium acridum
PKANEDTVKFISGFEGWSDHVYRDPGPQHLETLGYGHLCKKPNCAEVKYPFPPLSKADGLKLLSDDMSVAENCIYKDVNPKVALNANQYGALVSWAFNVGCGNVASSRLIRRLNAGEDPNTVAAQELPQWNKAGGKVLPGLTRRRNAEVELFKTPTNDPALP

SEQ ID NO: 148 - protein, 162 aa, Metarhizium robertsii
PKANEATVKFISTFEGWYDHVYPDPGPQHLETLGYGHLCKKPNCAEVKYPFPPLSKADGLKLLSDDMSVAENCIYQDTSAKVTLNANQYGALVSWAFNVGCGNVASSRLIRRLNAGEDPNTVAAQELPQWNRAGGKVLPGLTRRRNAEVELFKTPTNDPALP

SEQ ID NO: 149 - protein, 162 aa, Fusarium oxysporum
PSSNQATVDLIGEFEGFVPHIYKDAAGYPTVGYGHLCSNSKCTDVKYPIPLSKANGKKLLADDMRKFEKCIAKMVSSKVTLNKNQFGALVSWSFNLGCGAAEGSQLLKRLNKGEKPNTVISQELPKWVYAGGRKLPGLVRRRNAEVALAKKATSEKALPVKC

SEQ ID NO: 150 - protein, 161 aa, Fusarium oxysporum
PKSNAATVKLISSFEGFRPDVYNDPTGNPTVGYGHLCDAPQCSEVKYPVPLSVANGKKLLADDMKEFEVCITAMLNSKARLNRNQYGALISWAFNMGCGNAESTLVGRLNNGEDPNTVISQELPQWVYASGQRLPGLVHRRNAEIELAQKPTRRSALPKRC

SEQ ID NO: 151 - protein, 162 aa, Chaetomium thermophilum
PKSNQATVDLIAEFEGFRANIYTDAAGYATVGYGHKCQKAKCAEVKYKIPLSKADGKKLLADDMRSFEVCITNMLNSKAKLNYNQFGALVSWSFNVGCGAAKSSTLIKRLNNGENVNKVLSEELPKWNKAGGKVLQGLVRRRAAEVALAKKSGSSQALPVKC

SEQ ID NO: 152 - protein, 154 aa, Verticillium dahliae
PNVNAATISLITEFEGWYPNIYIDPVGLPTVGYGHLCADSSCSDVRYPIPLSRANGEQLLRDDIAGFQNCITLQTASSVVLNANQYGALVSWAFNVGCGATRTSTLIQRLNAGGDPNTVAAEELPKWNRGGGQVLPGLTRRRAAEVALHRTATS

SEQ ID NO: 153 - protein, 162 aa, Fusarium oxysporum
PSSNQATVDLIGEFEGFVPHIYKDAAGYPTVGYGHLCSNSKCTDVKYPIPLSKANGKKLLADDMRKFEKCIAKMISSKVTLNKNQFGALVSWSFNLGCGAAEGSQLLKRLNKGEKPNTVISQELPKWVYAGGRKLPGLVRRRNAEVALAKKATSEKALPVKC

SEQ ID NO: 154 - protein, 162 aa, Fusarium oxysporum
PSSNKATVDLIGEFEGFVPHIYKDAAGYPTVGYGHLCSNSKCTDVKYAIPLSKANGKKLLADDMRKFEKCIAKMVSSKVTLNKNQFGALVSWSFNLGCGAAEGSQLLKRLNKGEKPNTVISQELPKWVYAGGRKLPGLVRRRNAEVALAKKATSEKALPVKC

SEQ ID NO: 155 - protein, 162 aa, Fusarium oxysporum
PKSNAATVNLIASFKGFRPDVYNDPTGNPTVGYGHLCDAPQCSEAKYPIPLSIVNGKKLLADGMKEFEICITAMLNSKANLNRNQYGALISWAFNMGCGNADSSTLVGRLNNGEDPNTVISQELPQWVNVSGQRLPGLVRRRNAEIELAQKPTRRRALPKRC

SEQ ID NO: 156 - protein, 162 aa, Fusarium oxysporum; identical to SEQ ID NO: 146

SEQ ID NO: 157 - protein, 162 aa, Fusarium oxysporum
PKSNAATVNLIASFEGFRPDVYNDPTGNPTVGYGHLCDAPQCSEVKYPVPLSVANGKKLLADDMKEFEVCITAMLNSKARLNRNQYGALISWAFNMGCGNAESSILVGRLNNGEDPNSVISQELPQWVYASGQRLPGLVLRRNAEIELAQKPTRRRALPKRC

SEQ ID NO: 158 - protein, 162 aa, Fusarium oxysporum; identical to SEQ ID NO: 146

SEQ ID NO: 159 - protein, 162 aa, Fusarium oxysporum
PSSNQATVDLIGEFEGFVPHIYKDAAGYPTVGYGHLCSNSKCTDVKYAIPLSKANGKKLLADDMRKFEKCIAQMVSSKVTLNKNQFGALVSWSFNLGCGAAEGSQLLKRLNKGEKPNTVISQELPKWVYAGGRKLPGLVRRRNAEVALAKKATSEKALPVKC

SEQ ID NO: 160 - protein, 126 aa, Fusarium oxysporum
PKSNAATINLIASFEGFRPDVYNDPTGNPTVGYGHLCDAPQCSEVKYPIPLSIVNGKKLLADGMKEFEICITAMLNSKANLNRNQYGALISWAFNMGCGNADSSTLVGRLNNGEDPNIVISQELPQ

SEQ ID NO: 161 - protein, 162 aa, Gibberella moniliformis
PKSNAATVNLIASFEGFRPDVYNDPTGNPTVGYGHLCDAPQCSEVKYPIPLSVVNGKKLLADDMKEFEVCITAMLNSKAKLNRNQYGALISWAFNMGCGNAESSTLIGRLNNCEDPNTVISQELPQWEYASGQRLPGLLRRRNAEIELAQKPTRRRALPKRC

SEQ ID NO: 162 - protein, 162 aa, Fusarium oxysporum; identical to SEQ ID NO: 149

SEQ ID NO: 163 - protein, 162 aa, Fusarium oxysporum
PKSNAATVNLIASFEGFRPDVYNDPTGNPTVGYGHQCDAPQCSEVKYPVPLSVANGKKLLADDMKEFEVCITAMLNSKARLNRNQYGALISWAFNMGCGNGESSTLVGRLKNGEDPNTVISQELPQWVYASGQRLPGLVHRRNAEIELAQKPTRRRALPKRC

SEQ ID NO: 164 - protein, 161 aa, Fusarium oxysporum; identical to SEQ ID NO: 150

SEQ ID NO: 165 - protein, 139 aa, Fusarium oxysporum
PKSNVATINLIASFEGFRPDFYNDPTGNPTVGYGHLCDAPQCSEVKYPIPLSIVNGKKLLADGMKEFEICITAMLNSKANLNRNQYGALISWAFNMGCGNANSSTLVGRLNNEEDPNTVISQELPQWVNVSGQRLPGLV

SEQ ID NO: 166 - protein, 162 aa, Fusarium oxysporum
PKSNAATVNLVASFEGFKPDVYNDPTGNPTVGYGHLCDAPQCSEVRYPVPLSVANGKKLLADDMKGFAVCISAMLNSKARLNRNQYGALISWAFNMGCGNAESSTLIGRLNNWEDPNTVISQELPRWVYASGKRLPGLVRRRNAEIELAQKPTRRRALPKRC

SEQ ID NO: 167 - protein, 162 aa, Gibberella fujikuroi
PKSNAATVNLIASFEGFRPDVYSDPTGNPTVGYGHLCDAPQCSEVKYPIPLSVANGKKLLVDDMKDFEVCLTAMLNSKAKLNRNQYGALISWAFNMGCGNAQSSTLVGRLNNGEDPNTVISQELPHWVYASGQRLPGLVRRRNAEIELAQKPTRRRALPKRC

SEQ ID NO: 168 - protein, 145 aa, Glarea lozoyensis
PKVNTATLKLIEGFEGWSATAYKDPDGNPTIGYGHLCSSASCKEIKYSIPLSRAEGDSLIQDDLAVARKCIAKQIKDSIKLNANQFGALVSWAFNVGCGNSGDSTLIRRLNAGEAPNTVAGQELPKWNRGKNGVLPGLTRRRNAE

SEQ ID NO: 169 - protein, 160 aa, Coniosporium apollinis
PDVNAATVALIKEFEGFVRSPAPDPIGLPTVGFGHLCKTAGCAEVPYKFPLTEAQAAALLQTDLKTYEKCLADKVADSVRLNDNQYGALVSWTFNVGCGNMGSSTLVRRLNAGEAPNTVAAQELPKWNKAGGNVLAGLTRRRAAEVRLFQTASGTQALPS

SEQ ID NO: 170 - protein, 162 aa, Endocarpon pusillum
PDVNAATVALIKEFEGFVKSPAPDPIGLPTVGYGHLCKTNGCSEVPYPFPLSEAQAAALLQTDLKSYEKCLADKVSDSVKLSDNQYGALVSWTFNVGCGNMGGSTLVTRLNNGESPNTVAAQELPKWNKAGGSALAGLTRRRAAEVQLFQTASGTQALPAKC

SEQ ID NO: 171 - protein, 105 aa, Fusarium oxysporum
DPTGNPTVGYGHLCDAAQCSEVKYPIPLSIVNGKKLLADGMKEFEICNPAMLNSKANLNRNQYGALISWAFNMGRGNADSSTLVGRLNNGEDPNTVISQELPQWV

SEQ ID NO: 172 - protein, 150 aa, Stachybotrys chartarum
PTTNSATVSLIQEFEGWSPTIYLDPSGYPTVGYGHLCANSRCTDVPYPIPLSTANGNLLLQSDMLVARRCIAQDVNVRLNANQYGALVSWAFNVGCGASGSSTLVRRLNAGENPNTVAAEELPRWVNSGGVQLPGLVRRRNAEVALFRTA

SEQ ID NO: 173 - protein, 160 aa, Acremonium chrysogenum
PKSNKATVDLISEFEGFRADIYIDATGHPTVGYGHLCSDKKCSDVSYPIPLSKANGKKLLAKDMRRFEKCITNMVDAKVNKNQYGALVSWSFNVGCGAAQGSQLVKRLNKGQKVNKVLSEELPKWVHGGGQVLPGLVRRRKAEIALAKKKTDAKALPPTC

SEQ ID NO: 174 - protein, 150 aa, Acremonium chrysogenum
PEVNQPALNLVQQFEDFRATIYKDPAGHPAVGYGHLCSDSACSDVPYTIPLSYTDAERLLRDDLADCITNDTGNNVVLNANQYGALVSWAFNVGCENSGFSALIERLNMGEDPTSVATDELPRWNMIGDEVVPAFERRRAAEVDLFLAPS

SEQ ID NO: 175 - protein, 155 aa, Acremonium chrysogenum
PAANAATVSLVAEFEGFSPDIYDDPSGYPTVGYGHLCGDPSCSEVPYPIPLSEEDGRKLLASDMAVAQNCITMQTAESVVLNDNQYGALVSWAFNVGCGNSGSSTLISRLNAGEDPNTVAAEELPKWKYSGGVELPGLVRRRAAEVDLHKTPSDV

SEQ ID NO: 176 - protein, 157 aa, Metarhizium anisopliae
PKANEATVKFISTFEGWYDHVYPDPGPQHLETLGYGHLCKKPNCAEVKYPFPPLSKADGLKLLSDDMSVAENCIYQDTSAKVTLNANQYGALVSWAFNVGCGNVASSRLIRRLNAGEDPDTVAAQELPQWNRAGGKVLPGLTRRRNAEVELFKTPTN

SEQ ID NO: 177 - protein, 150 aa, Stachybotrys chlorohalonata
PTTNSATVSLIQEFEGWSSTIYLDPSGYPTVGYGHLCANSRCTDVPYPIPLSTANGNLLLQSDMLVARRCIAQDVNVRLNANQYGALVSWAFNVGCGASGSSTLVRRLNAGENPNTVAAEELPRWVNSGGVQLPGLVRRRNAEVALFRTA

SEQ ID NO: 178 - protein, 158 aa, Pseudogymnoascus pannorum
PKSNGATVDLIAEFEGFVPNVYTDATGHATVGYGHLCQKSKCSEVPYHIPLTKANGKKLLASDIGVYEKCVTAMLNSKAKVNLNQYGALVSLTFNMGCGAIKSSAIVTRLNKGEKATTVISSEFPKWVHGGGKVLPGLVRRRKAEVALAKKTAGKALP

SEQ ID NO: 179 - protein, 158 aa, Pseudogymnoascus pannorum
PKSNAATVNLIAEFEGFVPHVYTDATGHPTVGYGHLCSNSKCSDAGYPIPISKANGKKLLAKDMGKAEKCITAMVNSKVTLNANQYGALVSLAFNVGCGAMKSSTLVKRLNNGEKASVVYPKEFPKWVHGNGKVLPGLVRRRKAEVALSKKAAGKALP

SEQ ID NO: 180 - protein, 158 aa, Pseudogymnoascus pannorum
PKSNAATVDLIAEFEGFVPKVYTDATGHPTVGYGHLCSNSKCSDAGYPIPLSKANGKKLLAKDMGKAEKCVTAMVNSKVTLNANEYGALVSLAFNVGCGAMQSSSLVKRLNNGEKASVVYPVEFPKWVHGNGKVLPGLVRRRKAEVALSKKAAGKALP

SEQ ID NO: 181 - protein, 158 aa, Pseudogymnoascus pannorum
PHSNTATVNLIAEFEGFVPNVYTDATGHPTVGYGHLCSNSKCSGIGYPIPLSVANGKKLLAKDMGVAERCITAMTNSKAVLNANQYGALVSLTFNMGCGAIQSSAIIKRINNGEKASVVFPNEFPKWVHGGGVVLPGLVRRRNAEIALSKKAADKVLP

SEQ ID NO: 182 - protein, 158 aa, Pseudogymnoascus pannorum
PHSNTATVNLIAEFEGFVPNVYTDATGHPTVGYGHLCSNSKCSGIGYPIPLSVANGKKLLAKDMGVAEKCITAMTNSKAVLNANQYGALVSLTFNMGCGAIQSSDIIKRINKGEKASVVFPSEFPKWVHGGGVVLPGLVRRRNAEIALSKKAADKVLP

SEQ ID NO: 183 - protein, 162 aa, Torrubiella hemipterigena
PAVNQATVNLVAEFEGFRASEYTDATGHPTIGYGHLCTAKGCADVAYPKPLSEADGKKQLAKDLAVAQNCITTMTANPVTLNANQYGALVSWAFNVGCGAAKSSTLIKELNAGKDARTVIDTELPKWNKGNGKPIAGLTRRRKAEVDLSHVATSQGALPAKC

SEQ ID NO: 184 - protein, 164 aa, Torrubiella hemipterigena
PVANAATVEFVSGFEGWRDYVYRDPGNGFQTLGYGHLCKKPNCAEVPYKFPPLSKADGLKLLSSDMAIAENCVTKDIKDKIVLNANQYGALVSWAFNVGCGNVASSSLIRRLNAGENPNVVAASELPKWNKDAKGHVLPGLTRRRAAEVKLFQTPTSEHALPAC

SEQ ID NO: 185 - protein, 158 aa, Pseudogymnoascus pannorum
PHSNTATVNLIAEFEGFVPNVYTDATGHPTVGYGHLCSNSKCSGIGYPIPLSVANGKKLLAKDMGVAERCITAMTNSKAVLNANQYGALVSLTFNMGCGAIQSSDIIKRINNGEKASVVFPKEFPRWVHGGGVVLPGLVRRRNAEIALSKKAADKVLP

SEQ ID NO: 186 - protein, 158 aa, Pseudogymnoascus pannorum; identical to SEQ ID NO: 180

SEQ ID NO: 187 - protein, 158 aa, Pseudogymnoascus pannorum
PKSNAATVDLIAEFEGFVAKVYIDATGHPTVGYGHLCTKSKCAEVGYPIPLSKANGKKLLATDMAKAEKCVTAMLNSKAVLNANQYGALVSLAFNVGCGAVQSSSIVTRLNKGEKAATVYPQEFPKWVHGGGKVLPGLVRRRNAEVALAKKAAGKALP

SEQ ID NO: 188 - protein, 158 aa, Pseudogymnoascus pannorum; identical to SEQ ID NO: 187

SEQ ID NO: 189 - protein, 158 aa, Pseudogymnoascus pannorum
PKSNAATVDLIAEFEGFVPNVYTDATGHATVGYGHLCQKSKCSEVPYHIPLTKANGKKLLASDIGVYEKCVTAMLNSKAKLNLNQYGALVSLTFNMGCGAIKSSAIVTRLNKGEKATTVISGEFPKWVHGGGKVLPGLVRRRKAEVALAKKTAGKALP

SEQ ID NO: 190 - protein, 158 aa, Pseudogymnoascus pannorum
PKSNAATVDLIAEFEGFVPNVYIDATGHPTVGYGHLCTKSKCAEIGYPIPLSKANGKKLLAKDIAKFEKCVTAMLKSKAVLNLNQYGALVSLAFNVGCGAVQSSSIVTRLNKGEKAATVFPQEFPKWVHGNGKVLPGLVRRRKAEVALAKKAAGKALP

SEQ ID NO: 191 - protein, 162 aa, Pseudogymnoascus pannorum
PASNQATIDLIAGSEGFSGDVYTDPTGNPTVGYGHLCQDSTCADTGFPIPLSEEDGKKLLAGDMKQFESCITTMTGDAVTLNLNQFGALVSWSFNNGCGAAQSSTLISRLNNGEDPNTVIEQELPQWVYGNGQILDGLVKRRQAEIDLAKTPTSDGALPAPC

SEQ ID NO: 192 - protein, 162 aa, Metarhizium majus
PKANEATVKFISTFEGWYDHVYPDPGPQHLETLGYGHLCKKPNCAEVKYPFPPLSKADGLKLLSDDMSVAENCIYQDTNAKVTLNANQYGALVSWAFNVGCGNVASSRLIRRLNAGEDPNMVAAQELPQWNRADGKVLPGLTRRRNAEVELFKTPTNDPALP

SEQ ID NO: 193 - protein, 162 aa, Metarhizium guizhouense
PKANEATVKFISTFEGWYDHVYPDPGPQHLETLGYGHLCKKPNCAEVKYPFPPLSKADGLKLLSDDMSVAENCIYQDTNAKVTLNANQYGALVSWAFNVGCGNVASSRLIRRLNAGEDPNTVAAQELPQWNRADGKVLPGLTRRRNAEVELFKTPTNDPALP

SEQ ID NO: 194 - protein, 262 aa, Trichophaea saccata
MHALTLLTATLFGLAAAYPVKTDLHCRSSPSTSASIVRTYSSGTEVQIQCQTTGTSVQGSNVWDKTQHGCYVADYYVKTGHSGIFTTKCGSSSGGGSCKPPPINAATVALIKEFEGFVPKPAPDPIGLPTVGYGHLCKTKGCKEVPYSFPLTQETATKLLQSDIKTFTSCVSNYVKDSVKLNDNQYGALASWAFNVGCGNVQTSSLIKRLNAGENPNTVAAQELPKWKYAGGKVMPGLVRRRNAEVALFKKPSSVQAHPPKC

SEQ ID NO: 195 - protein, 245 aa, Trichophaea saccata; identical to SEQ ID NO: 64

SEQ ID NO: 196 - protein, 263 aa, Chaetomium thermophilum
MKFAILAAVASFLAPASAYAITGDNVNCRSGPGTSYAVKKVYKKGTDVKISCQTTGTNINGNNLWDKTSDGCYVSDYYVKTGSNGYVTSKCSSSGGSTCAAPKSNQATVDLIAEFEGFRANIYTDAAGYATVGYGHKCQKAKCAEVKYKIPLSKADGKKLLADDMRSFEVCITNMLNSKAKLNYNQFGALVSWSFNVGCGAAKSSTLIKRLNNGENVNKVLSEELPKWNKAGGKVLQGLVRRRAAEVALAKKSGSSQALPVKC

SEQ ID NO: 197 - protein, 249 aa, Chaetomium thermophilum; identical to SEQ ID NO: 65

SEQ ID NO: 198 - protein, 266 aa, Trichoderma harzianum
MKTAFAALVFSLASIVSAYPITGDVVNCRTGPGTSYAIKKSYKKNQDISISCQTAGTSVNGNSIWDKTADGCYVADYYVKTGSSGYVTKKCTASSGGGSSSSYCKTINSAGVDLIAKWEGFVASPKPDPIGLPTVGYGHLCQQKNCREVKYKFPLTKTTAKELLLDDLPKYTKCLADYLNDKPKLNANQWAALTSWVFNVGCGNAKTSTLVKRLNNGEAANTVAAEELPKWRMAGGKVLPGLEARRKDEVKLFKTASSKQAYPKCQ

SEQ ID NO: 199 - protein, 248 aa, Trichoderma harzianum; identical to SEQ ID NO: 66

SEQ ID NO: 200 - protein, 189 aa, Artificial Sequence
  Artificial aa-sequence
MAKVSTLTIALLTMASQARAQCVGCKPPPINAATVALIKEFEGFVPKPAPDPIGLPTVGYGHLCKTKGCKEVPYSFPLTQETATKLLQSDIKTFTSCVSNYVKDSVKLNDNQYGALASWAFNVGCGNVQTSSLIKRLNAGENPNTVAAQELPKWKYAGGKVMPGLVRRRNAEVALFKKPSSVQAHPPKC

SEQ ID NO: 201 - protein, 169 aa, Artificial Sequence
  Artificial aa-sequence
QCVGCKPPPINAATVALIKEFEGFVPKPAPDPIGLPTVGYGHLCKTKGCKEVPYSFPLTQETATKLLQSDIKTFTSCVSNYVKDSVKLNDNQYGALASWAFNVGCGNVQTSSLIKRLNAGENPNTVAAQELPKWKYAGGKVMPGLVRRRNAEVALFKKPSSVQAHPPKC

SEQ ID NO: 202 - protein, 166 aa, Acremonium alcalophilum
QCVGPEVNSASINLIKEFEGWYPDIYVDPAGYPTVGYGHLCSDSSCSDVSYSIPLSEADGENLLRDDITNFQNCITWQTASSVVLNANQYGALVSWAFNVGCGASESSSLIARLNAGEDPNTVAEEELPRWNQGGGQVLPGLVRRRAAEVELHQIPTDVAALPACS

SEQ ID NO: 203 - protein, 157 aa, Acremonium alcalophilum
QCVGPAINSAALNLIKEFEGWRPNIYRDPVGLPTVGYGHLCRDSSCSDVPYPIPLSVANGERLLRSDLATASSVVLNANQYGALVSWAFNVGCGATSTSTLIRRLNAGESPNTVAAQELPRWNKAGGQVLPGLVRRRAAEVELHRTSTSVRALPACS

SEQ ID NO: 204 - protein, 262 aa, Trichophaea minuta
MHALALLAATLFGLAAAYPAKVDLRCRSSPSTSASVVRTYSKGSEIQISCQTTGTSVEGSNVWDKTQHGCYVADYYVKTGHSGIFTTKCGSSSGGGSCKPPPINAATVALIKEFEGFVAKPAPDPIGLPTVGYGHLCKTKGCKEVPYSFPLTQTTATKLLQSDIKTFTSCVSNYVKDSVKLNDNQFGALSSWAFNVGCGNIQTSSLIKRLNAGENPNTVAAQELPKWKYAGGKVLPGLVRRRKAEVALFKKPSSVQAHPPKC

SEQ ID NO: 205 - protein, 262 aa, Artificial Sequence; identical to SEQ ID NO: 204
  Artificial aa-sequence

SEQ ID NO: 206 - protein, 245 aa, Trichophaea minuta; identical to SEQ ID NO: 67

SEQ ID NO: 207 - protein, 267 aa, Chaetomium sp
MKFAIIAAVVPFLAPASAYKISGSSVNCRSGPGTNYPVKKTYANGDEVTISCQTTGTNVEGNNIWDKTQHGCYVADKYVKTGKDGFVTKKCGSSGGGGGGKTCKAPKSNAATVDLIASFEGFRANIYTDATGHPTVGYGHMCTKSRCAEVKYKIPLSKADGKKLLADDMAKFEKCIKEMLNSKAKLNLNQYGALVSWSFNVGCGAAKGSQLVSRLNKGENPNTVLSNELPKWVHGNGKVLPGLVRRRNAEIALAKKSGSGAALPVKC

SEQ ID NO: 208 - protein, 249 aa, Chaetomium sp; identical to SEQ ID NO: 68

SEQ ID NO: 209 - protein, 264 aa, Mortierella sp
MKFTLALAALAASIPATLAYPITGADALHCRSGPGTSYPIQKTLRPPQDIKIQCQEPGTVVNGVSLWDKTQFGCYVSDYYVKTGTGNYVAPRCNSGGSSSACTGLNDAGINLIKEFEGFVPRPAPDPIGLPTVGYGHLCQTKGCGEVKYSFPLTTATATALLKDDLPKYTSCLAKALNGKPKLNKNQWAALASWTFNVGCGNMKSSSLITRLNAGQNPNTVATEELPKWKLAGGKVLPGLVRRRAAEVKLFKTANSSQGYPKCA

SEQ ID NO: 210 - protein, 245 aa, Mortierella sp; identical to SEQ ID NO: 69

SEQ ID NO: 211 - protein, 266 aa, Metarhizium sp
MKFLAVANVLAMTSTVVVAYPVSADSLNCRAEPNTSSAIKTTYKKGEDVKISCQTEGPSINGNTIWDKTQDGCYVADYYVKTGSSGYVTGKCGGSSPPSGSGFCKTVNKAGLDLITKWEGFVSSPRGDPIGLPTVGYGHLCQKKGCAEVKYKFPLTKATALQLLNDDLPKYTGCLGKLLNSKVKLNDNQWAALTSWVFNVGCGNAQSSSLVRRLNNGENPNTVAPSELPKWKMAGGKVLEGLVKRRADEVRLFKVSSSKGAFPKCQ

SEQ ID NO: 212 - protein, 247 aa, Metarhizium sp; identical to SEQ ID NO: 70

SEQ ID NO: 213 - protein, 268 aa, Geomyces auratus
MKLSLLAVGAVACSFVSAAFPITGSTVNCRTGPGTSHGVKTSYKKGHEVTVSCQTGGTSVNGNSIWDKTSDGCYVADYYVKTGSSGYVKPKCGSSSGGGGGSSCGAPKSNAATVNLIAEFEGFVSHVYTDATGHPTVGYGHLCSNSKCSGIGYSIPISKANAKKLLAKDMAIAEKCITAMINKSRTLNLNQYGALVSWAFNEGCGAAKSSTLIKRINNGEKPSTVIPQELPKWVYGGSSVLPGLVRRRNAEIALAKKATSSKALPAHC

SEQ ID NO: 214 - protein, 250 aa, Geomyces auratus; identical to SEQ ID NO: 71

SEQ ID NO: 215 - protein, 258 aa, Ilyonectria rufa
MKFSLFAVYALAASLTSAYKITGDNVNCRSGPGTSYSVKRSFKKGTDVTLSCQTTGENVLGTSIWDKTSYGCYVSDYYVKTGSSGFVVKKCGTCGAPKSNAATVNLISDFEGFRANIYKDAAGYPTVGYGHLCSNSRCTDVPYSIPLSKANGKNLLATDMTKFEKCITAMVSSSVTLNKNQYGALVSWAFNMGCGATKTSTLIKRLNQGQNVNTVLSTELPKWVYAGGKKLNGLVRRRNAEIALAKKKTTEKALPNKC

SEQ ID NO: 216 - protein, 240 aa, Ilyonectria rufa; identical to SEQ ID NO: 72

SEQ ID NO: 217 - protein, 245 aa, Penicillium simplicissimum
MHFSLLAISAAIALPLASAYPVNADDLHCRSGPGTNYGIVKSYKRGTDLSITCQATGTDVNGDELWDKTSDGCYVSDYYVKTGSSSYVTKHCDGSSGGGSSGGNLPGLTATQSKHAKEIIAEAKREDLGLHGCSAGIATALVESNILIYANKAVPSSLNYPHDAVGSDHDSVGIFQQRAMYYPNIAADMDAAKSAAQFFEKMKNVSGWKSMAVGSLCQKVQGSAYPTRYAERVSEAEKICKAGGI

SEQ ID NO: 218 - protein, 226 aa, Penicillium simplicissimum
YPVNADDLHCRSGPGTNYGIVKSYKRGTDLSITCQATGTDVNGDELWDKTSDGCYVSDYYVKTGSSSYVTKHCDGSSGGGSSGGNLPGLTATQSKHAKEIIAEAKREDLGLHGCSAGIATALVESNILIYANKAVPSSLNYPHDAVGSDHDSVGIFQQRAMYYPNIAADMDAAKSAAQFFEKMKNVSGWKSMAVGSLCQKVQGSAYPTRYAERVSEAEKICKAGGI

SEQ ID NO: 219 - protein, 245 aa, Penicillium vasconiae
MHFSLLAISAAIALPLASAYPVNADDLHCRSGPGTSYGIVKSYKRGTDLTITCQAAGTDVNGDELWDKTSDGCYVSDYYVKTGSSSYVAKHCDGGSSGGSSGGDLPGLSATQSKHARAIIAEAKSEDLGLHGCSAGIATALVESSILIYANRDVPTSLNYPHDAIGSDNDSVGIFQQRAIYYPDIAADMDAAKSAAQFFKKMKNISGWKSMAVGTLCQKVQGSAYPTRYAERVAEAEKICNAGGI

SEQ ID NO: 220 - protein, 226 aa, Penicillium vasconiae
YPVNADDLHCRSGPGTSYGIVKSYKRGTDLTITCQAAGTDVNGDELWDKTSDGCYVSDYYVKTGSSSYVAKHCDGGSSGGSSGGDLPGLSATQSKHARAIIAEAKSEDLGLHGCSAGIATALVESSILIYANRDVPTSLNYPHDAIGSDNDSVGIFQQRAIYYPDIAADMDAAKSAAQFFKKMKNISGWKSMAVGTLCQKVQGSAYPTRYAERVAEAEKICNAGGI

SEQ ID NO: 221 - protein, 243 aa, Talaromyces proteolyticus
MFATSLIALSLVTILPISNAYPIKTDGLHCRSGPGTGYSIVKTYNKGEEVSITCQAPGTDVNGDSLWDKTSDGCYVTDYYVSTGTSGYVTGECGSTGGSGGKLPGLDSTQSSHARAIIAEAKKESLGRQGCLAGIATALTESSILVYANEAVPESMKYKHDAVGSDHDSIGIFQQRAMYYPNIAADMDPAKSAAQFFAKMKEVSGWRSMNVGELCQKVQGSAYPTRYEQHLSAAEAICSADSD

SEQ ID NO: 222 - protein, 223 aa, Talaromyces proteolyticus
YPIKTDGLHCRSGPGTGYSIVKTYNKGEEVSITCQAPGTDVNGDSLWDKTSDGCYVTDYYVSTGTSGYVTGECGSTGGSGGKLPGLDSTQSSHARAIIAEAKKESLGRQGCLAGIATALTESSILVYANEAVPESMKYKHDAVGSDHDSIGIFQQRAMYYPNIAADMDPAKSAAQFFAKMKEVSGWRSMNVGELCQKVQGSAYPTRYEQHLSAAEAICSADSD

SEQ ID NO: 223 - protein, 324 aa, Aspergillus sp. XZ2668
MMFIPLVTLCFAAAIPVVRAYPVKADVHCRSGPGTSYSIVKTYSTGTQISVSCQAAGTDVDGDQLWDKTSDGCYVSDYYVSTGSSNYVTSHCPTEYAIKTDVNCRSGPGTNYGIVKTYNQGVMVSLNCQASGTDVDGDSLWDKTSDGCYVSDYYVATGSSSYVTSACSGSSSSGGGGSSSSGNLPSLDSTQSAHARAIIGEAKSQNVGRQGCLAGIATALVESSMLMYANSNVAASLSYPHDAVGSDYDSVGLFQQRVSIYTNLAADMDAAQSAGQFFDEMKKVSGWETMNVGDLCQEVQRSAYPDRYAGEVSTAESICSAGGL

SEQ ID NO: 224 - protein, 304 aa, Aspergillus sp. XZ2668
YPVKADVHCRSGPGTSYSIVKTYSTGTQISVSCQAAGTDVDGDQLWDKTSDGCYVSDYYVSTGSSNYVTSHCPTEYAIKTDVNCRSGPGTNYGIVKTYNQGVMVSLNCQASGTDVDGDSLWDKTSDGCYVSDYYVATGSSSYVTSACSGSSSSGGGGSSSSGNLPSLDSTQSAHARAIIGEAKSQNVGRQGCLAGIATALVESSMLMYANSNVAASLSYPHDAVGSDYDSVGLFQQRVSIYTNLAADMDAAQSAGQFFDEMKKVSGWETMNVGDLCQEVQRSAYPDRYAGEVSTAESICSAGGL

SEQ ID NO: 225 - protein, 247 aa, Penicillium antarcticum
MHFQLVTLSVALLSPFINAYPITGDTVNCRSGPGTSYSVVKSYKKGADVAITCQASGTDIKGDSIWDKTADGCYVADFYVKTGSSSYVTKKCNSGSGGGGGSSSGNLPGLTSTQSKHAKAIIGEAKKEDLGRQGCLAGIATALVESNILIYANKKVPSSLNYPHDAVGSDYDSVGIFQQRAKYYPSIAADMDPAKSAAQFFKGMKGVSGWKTMEVGKLCQKVQGSAYPTRYAGRVDEAEKICAAGGL

SEQ ID NO: 226 - protein, 228 aa, Penicillium antarcticum
YPITGDTVNCRSGPGTSYSVVKSYKKGADVAITCQASGTDIKGDSIWDKTADGCYVADFYVKTGSSSYVTKKCNSGSGGGGGSSSGNLPGLTSTQSKHAKAIIGEAKKEDLGRQGCLAGIATALVESNILIYANKKVPSSLNYPHDAVGSDYDSVGIFQQRAKYYPSIAADMDPAKSAAQFFKGMKGVSGWKTMEVGKLCQKVQGSAYPTRYAGRVDEAEKICAAGGL

SEQ ID NO: 227 - protein, 250 aa, Ovatospora brasiliensis
MQISLIALTLAAAVLPAVSAYPVKADSLNCRSGPGTSYKVVKTYKKGADIKISCQTEGPSVNGDNLWIKTQDGCYVADYYVKTGTNGYVAKKCSSGGSTGGGSGGGKGNLPGLNAKQSSHARAIVAQAKKDGVGLHGCEAGIATALVESGIKVYANKKVPASLKYPHDAVGSDHDSIGIFQQRAVYYPNIAADMDPARSAHQFFAKMKGVSGWKTMAVGKLCQKVQVSAYPDRYAKRVSEATKICKAAGI

SEQ ID NO: 228 - protein, 230 aa, Ovatospora brasiliensis
YPVKADSLNCRSGPGTSYKVVKTYKKGADIKISCQTEGPSVNGDNLWIKTQDGCYVADYYVKTGTNGYVAKKCSSGGSTGGGSGGGKGNLPGLNAKQSSHARAIVAQAKKDGVGLHGCEAGIATALVESGIKVYANKKVPASLKYPHDAVGSDHDSIGIFQQRAVYYPNIAADMDPARSAHQFFAKMKGVSGWKTMAVGKLCQKVQVSAYPDRYAKRVSEATKICKAAGI

SEQ ID NO: 229 - protein, 251 aa, Penicillium wellingtonense
MPLTKFLPVLALSLLTPFATAYPITGDVVNCRSGPGTTYDVVKSYKLNADVSITCQAPGTDVKGDSVWDKTADGCYVADYYVKTGSSSYVTTKCGGDDDGGDNDGGSSGNLPGLTSTQSKHAKDIIAEAKSEDLGRQGCLAGIATAIVESNILIYANSGVPESLKYPHDAVGSDHDSVGIFQQRAMFYKDIAADMDAGKSAGQFFGKMKAVSGWKSMDVGTLCQKVQGSAYPSRYAEQVSKAEKICKAGGL

SEQ ID NO: 230 - protein, 230 aa, Penicillium wellingtonense
YPITGDVVNCRSGPGTTYDVVKSYKLNADVSITCQAPGTDVKGDSVWDKTADGCYVADYYVKTGSSSYVTTKCGGDDDGGDNDGGSSGNLPGLTSTQSKHAKDIIAEAKSEDLGRQGCLAGIATAIVESNILIYANSGVPESLKYPHDAVGSDHDSVGIFQQRAMFYKDIAADMDAGKSAGQFFGKMKAVSGWKSMDVGTLCQKVQGSAYPSRYAEQVSKAEKICKAGGL

SEQ ID NO: 231 - protein, 254 aa, Penicillium roseopurpureum
MPSTKFLPFVAIALIAAPLSSAYPITGDVVNCRSGPGTSYDVVKSYKLDSDVTIKCQASGTDVKGDSIWDKTSDGCYVADYYVKTGSSSYVTTKCDDNGGDDDDDEGGSSGGNLPGLTSTQSKHAKEIIAEAKSENLGHRGCTAGIATAIVESNILIYANNAVPESLKYPHDKVGSDHDSVGIFQQRAMFYKDIAADMDAGKSAAQFFEKMTAISGWKSMDVGTLCQKVQGSAYPTRYAEQVSKAEKICSAGGL

SEQ ID NO: 232 - protein, 232 aa, Penicillium roseopurpureum
YPITGDVVNCRSGPGTSYDVVKSYKLDSDVTIKCQASGTDVKGDSIWDKTSDGCYVADYYVKTGSSSYVTTKCDDNGGDDDDDEGGSSGGNLPGLTSTQSKHAKEIIAEAKSENLGHRGCTAGIATAIVESNILIYANNAVPESLKYPHDKVGSDHDSVGIFQQRAMFYKDIAADMDAGKSAAQFFEKMTAISGWKSMDVGTLCQKVQGSAYPTRYAEQVSKAEKICSAGGL

SEQ ID NO: 233 - protein, 248 aa, Penicillium virgatum
MMFTPLLALTFAAIAPIVNAYPITGDGVNCRSGPGTSYSVVKSYQKGADVAITCQAPGTDVKGDNIWDKTADGCYVADYYIKTGSSSYVTAKCDDSGSGSGGDSSGNLPGLTSTQSKHAKAIIGEAKKEDLGRQGCLAGIATALVESNIYIYANKKVPSSLNYPHDKVGSDYDSVGIFQQRAVYYPNIAADMDAAKSAGQFFAKMKGISGWKSMEVGKLCQKVQGSAYPTRYAERLSEAKKICAAGGL

SEQ ID NO: 234 - protein, 228 aa, Penicillium virgatum
YPITGDGVNCRSGPGTSYSVVKSYQKGADVAITCQAPGTDVKGDNIWDKTADGCYVADYYIKTGSSSYVTAKCDDSGSGSGGDSSGNLPGLTSTQSKHAKAIIGEAKKEDLGRQGCLAGIATALVESNIYIYANKKVPSSLNYPHDKVGSDYDSVGIFQQRAVYYPNIAADMDAAKSAGQFFAKMKGISGWKSMEVGKLCQKVQGSAYPTRYAERLSEAKKICAAGGL

SEQ ID NO: 235 - protein, 248 aa, Aspergillus niveus
MLYLFLTALSFAATAPLVGAYPITGDGVNCRSGPGTSHAVVKSYPKGHEISIVCQAAGTDVKGDDLWDKTSDGCYVADYYVKTGTTGYVTKHCDGGSDGGSSGGSGNLPGLTATQSSHAHKIIGEAKKEGLGRQGCLAGIATALVESNILVYANSKVPASLNYPHDAVGHDYDSVGIFQQRAVYYPDIAADMDPARSAAQFFAKMKNISGWKTMDVGKLCQKVQVSAYPDRYAERVPAAEKICSAGGL

SEQ ID NO: 236 - protein, 228 aa, Aspergillus niveus
YPITGDGVNCRSGPGTSHAVVKSYPKGHEISIVCQAAGTDVKGDDLWDKTSDGCYVADYYVKTGTTGYVTKHCDGGSDGGSSGGSGNLPGLTATQSSHAHKIIGEAKKEGLGRQGCLAGIATALVESNILVYANSKVPASLNYPHDAVGHDYDSVGIFQQRAVYYPDIAADMDPARSAAQFFAKMKNISGWKTMDVGKLCQKVQVSAYPDRYAERVPAAEKICSAGGL

SEQ ID NO: 237 - protein, 245 aa, Chaetomium sp. ZY369
MQLSLTALALAAALPMVSAYPVKADLLNCRTGPGTSYDLVTQYKKGTDVKITCQTTGTVVEGHNLWDKTSDGCYVADFYIQTGTSGYVADKCGETGGGGDTGGNLPGLTAVQSRNARAIIGEAKKEGLGRQGCEAGIATAIVESNILIYANKKVKESYNYPHDAVGEDHDSVGIFQQRVTFYPDIEASMDPARSAAQFFTEMKRISGWKTMDVGTLCQKVQRSAYPDRYGKQVDKAGKICAAGGM

SEQ ID NO: 238 - protein, 226 aa, Chaetomium sp. ZY369
YPVKADLLNCRTGPGTSYDLVTQYKKGTDVKITCQTTGTVVEGHNLWDKTSDGCYVADFYIQTGTSGYVADKCGETGGGGDTGGNLPGLTAVQSRNARAIIGEAKKEGLGRQGCEAGIATAIVESNILIYANKKVKESYNYPHDAVGEDHDSVGIFQQRVTFYPDIEASMDPARSAAQFFTEMKRISGWKTMDVGTLCQKVQRSAYPDRYGKQVDKAGKICAAGGM

SEQ ID NO: 239 - protein, 245 aa, Talaromyces atricola
MFATSLIALSLATILPISNAYPIKTDGLHCRSGPGTGYSVVKTYNKGEEVSIKCQAPGTNINGDILWDLTENGCYVADYYVSTGTSGYVTDKCGSSGGGGSDGDLPGLNSVQSSHARAIIAEAKQESLGHQGCLAGIATALTESSILVYANKAVPASMNYKYDAVGSDHDSIGIFQQRAMYYPDIAADMDPAKSAAQFFAKMKGVSGWQTMDVGDLCQKVQGSAYPTRYEQHLSAAKSICSADSD

SEQ ID NO: 240 - protein, 225 aa, Talaromyces atricola
YPIKTDGLHCRSGPGTGYSVVKTYNKGEEVSIKCQAPGTNINGDILWDLTENGCYVADYYVSTGTSGYVTDKCGSSGGGGSDGDLPGLNSVQSSHARAIIAEAKQESLGHQGCLAGIATALTESSILVYANKAVPASMNYKYDAVGSDHDSIGIFQQRAMYYPDIAADMDPAKSAAQFFAKMKGVSGWQTMDVGDLCQKVQGSAYPTRYEQHLSAAKSICSADSD

SEQ ID NO: 241 - protein, 244 aa, Trichocladium asperum
MQLSLIALTLAAAVPIVSAYPVKETLNCRSGPGTSYKVVKTYKQGADVKITCQTTGPTIKGSNIWDKTQDGCYVADYYIKTGSSGYVAAKCGASGGDGGGSGTLPGLNAVQSKHAKAIVGQAKKDGVGRHGCEAGIATALVESTMYVYANNKVPKSLNYPHDRVGSDYDSVGIFQQRAIYYPNIAADMDPARSAGQFFAKMKGVSGWKTMAVGKLCQKVQVSAYPDRYAQQVSKATKICAAAGL

SEQ ID NO: 242 - protein, 225 aa, Trichocladium asperum
YPVKETLNCRSGPGTSYKVVKTYKQGADVKITCQTTGPTIKGSNIWDKTQDGCYVADYYIKTGSSGYVAAKCGASGGDGGGSGTLPGLNAVQSKHAKAIVGQAKKDGVGRHGCEAGIATALVESTMYVYANNKVPKSLNYPHDRVGSDYDSVGIFQQRAIYYPNIAADMDPARSAGQFFAKMKGVSGWKTMAVGKLCQKVQVSAYPDRYAQQVSKATKICAAAGL

SEQ ID NO: 243 - protein, 323 aa, Metarhizium carneum
MHLTSLSVYLAVGGSMVAAYPIKDNNVNCRSGPGTSFSVVKQYKLDQDVTVSCQTHGESISGDTLWDKTSDGCYVADWYVRTGTSNMVTGQCGSGYPIKEDNVHCRSGPGTTFGVVKTYPKGQKVELSCQTQGETVSGNSLWDKTTDGCYVSDSLVQTGTSNMVAGQCAGAPSSPPSGGSGNLPGLSATQSAHARAIIAQVKKEGLGRQGCEAGLATGLTESSLRILANNAVPASLKYAHDGMGSDHDSVGIFQQRAMYYTDIACDMDAACSASSFFKGMTGISGWRTMDVAKLCQAVQRSAYPDAYQKYVGAAAEICAAGGS

SEQ ID NO: 244 - protein, 304 aa, Metarhizium carneum
YPIKDNNVNCRSGPGTSFSVVKQYKLDQDVTVSCQTHGESISGDTLWDKTSDGCYVADWYVRTGTSNMVTGQCGSGYPIKEDNVHCRSGPGTTFGVVKTYPKGQKVELSCQTQGETVSGNSLWDKTTDGCYVSDSLVQTGTSNMVAGQCAGAPSSPPSGGSGNLPGLSATQSAHARAIIAQVKKEGLGRQGCEAGLATGLTESSLRILANNAVPASLKYAHDGMGSDHDSVGIFQQRAMYYTDIACDMDAACSASSFFKGMTGISGWRTMDVAKLCQAVQRSAYPDAYQKYVGAAAEICAAGGS

SEQ ID NO: 245 - protein, 246 aa, Thielavia terrestris
MQLSLLVLSLVAAVPMASAYPVKADTLNCRSGPGTSYKVIKTYKKGTDLKITCQTPGTSVNGDNLWDKTSDGCYVADYYVKTGTSGYVTAHCDAGSGSGSSGGGNLPGLNSVQSSHARAIIGEAKKEGVGRHGCEAGIATALVESNILIYANKAVPASLKYPHDAVGSDHDSVGIFQQRAKYYPNIAADMDPARSAAQFFAKMKGIKGWQSMAVGTLCQKVQGSAYPDRYAKRVSEATKICQAGGL

SEQ ID NO: 246 - protein, 227 aa, Thielavia terrestris
YPVKADTLNCRSGPGTSYKVIKTYKKGTDLKITCQTPGTSVNGDNLWDKTSDGCYVADYYVKTGTSGYVTAHCDAGSGSGSSGGGNLPGLNSVQSSHARAIIGEAKKEGVGRHGCEAGIATALVESNILIYANKAVPASLKYPHDAVGSDHDSVGIFQQRAKYYPNIAADMDPARSAAQFFAKMKGIKGWQSMAVGTLCQKVQGSAYPDRYAKRVSEATKICQAGGL

SEQ ID NO: 247 - protein, 144 aa, Aspergillus clavatus
SGNLPGLTATQSSHARDIIGEAKKENLGRQGCLAGIATGLVESNLLIYANSKVPASLKYKHDAVGHDYDSVGIFQQRAIYYPDIAADMDPARSAAQFFAKMKNISGWKTMNVGKLCQKVQVSAYPDRYAQRVSAAEKICAAGGL

SEQ ID NO: 248 - protein, 137 aa, Salinispora tropica
GLTQTQMDNAKTIVDVGTDMNIPHRGLVVAIATAMQESTLLNYANAGVPESQNYPHEAVGWDHDSVGLFQQRSSTGWGSIAELMTPTYAAEAFYQALLQVPGWQGMSVAWAAQSVQVSAFPDAYAQHETRATTIVSA

SEQ ID NO: 249 - protein, 137 aa, Salinispora arenicola
GLTQAQMDNAKVIVDVGTRMDIPHRGLIVAIATAMQESTLLNYANGGVPESRNYPHQAVGWDHDSVGLFQQRPSSGWGSVAQLMRPTYAAEAFYQALLTIPGWQEMSVAWAAQSVQVSAFPDAYAQHVTRATTVVTA

SEQ ID NO: 250 - protein, 135 aa, Rhodococcus erythropolis
GLNASQTALAKQAVAIGESMGVPDQGIVVALATMSQESTYRMLASSNVPESLQYPHDGVGSDHLSVNQYQQQVGIWGTAEDLMNPVTANVKFFDALLKVSGWQSMPVTVAAQTVQGSAHPEAYADDETLARQLAS

SEQ ID NO: 251 - protein, 135 aa, Mycobacterium phage Pacc40
MTHTNDTYAREILRAGNDLGITPRGIVIAFATVFVESDWYMWANAKVPESLRLPHERVGNDGRSVGLFQQQVVWGNGAWWWGDAATCMDPYKSARLFFERLKTRDYSTGDPGAHAQAIQRSAYPDRYGQRMSEAQ

SEQ ID NO: 252 - protein, 144 aa, Penicillium rubens
SGNLPGLTSTQSKHAKDIIGEAKKEDLGRQGCLAGIATGLVESNMLMYANKKVPESLKYPHDAVGSDYDSVGIFQQRAVYYPDIAADMDAAKSAAQFFKGMKAISGWKTMEVGKLCQKVQRSAYPSRYSERVAEAKKICAAGGL

SEQ ID NO: 253 - protein, 136 aa, Micromonospora aurantiaca
GLDRTQMNNAKKIVQAGKEMGMPRRALVIAVATAMQESTLLNYASGVLPESQSYPHQAIGWDHDSVGLFQQRPSSGWGTVEQLMDPEYATKAFLSALAEIPGWQSLPLSVAAQAVQISAFPDAYAQHEWRAGEVVA

SEQ ID NO: 254 - protein, 147 aa, Micromonospora aurantiaca
TGDMPRFAEYGERQLRNAAVIIKVGQDMKLPARGWVIALATAMQESALRNLANSTVPASLALPHEGVGADHDSLGLFQQRPGWGSVEQRMTPSYAARKFYQKMEKVPDWQQRPLTVVAQKVQVSAYPDAYAKHEELAGAIVDALAGG

SEQ ID NO: 255 - protein, 137 aa, Micromonospora aurantiaca
GLDQRQMDNAKAIVDVGREMKMPRRALVVAVATAMQESNLYNLASDVLPQSFDHPHQGSGSDHDSVGLFQQRPSSGWGTVAQLMRPAYAARAFYAALREVPGWEDMSVTAAAQAVQVSAYPDAYARHEKRATTVVSA

SEQ ID NO: 256 - protein, 143 aa, Tuber melanosporum
GNLPGLDATQSRHARTIIAVAREYGVGNRGCQVSIVTAMQESRIRVLANPSVPDSNKYPHDGTGSDHDSVGIFQQRPQFWGTVKDCMDPKTSAGKFFTALKKVNGWERMEIGRAAQSVQRSAFPDAYTKHTPLAKGVCEAGGI

SEQ ID NO: 257 - protein, 142 aa, Hypocrea atroviridis
NLPGLNAVQTKYANAIIAKAKADDVGSHGCQAAIATAMVESSIIMYANKAVPGSLKYPHDRIGSDHDRVGLFQQRASIYKNVKCDMDAACSAGQFFAEMKKVSGWQTMAVGTLCQKIQRSAYPDRYAKQVGLATNVCKAGGL

SEQ ID NO: 258 - protein, 137 aa, Metarhizium acridum
LTELQAKYARGIIAQAKKERLGAQGCRAGIATALVESTLIMHANYAVPDSLVYDYDRLGYDRDSVGLFQQRASIYTDIKCSMNAACSAHQFFTEMKGVPEWRYMDVGTLCQEVQRSENPEQYHEFIDQAVDICKEGG

SEQ ID NO: 259 - protein, 142 aa, Metarhizium robertsii
NLPSLNAAQSGYAKSIIAKAKAAGVQRHGCQAAIATGLVESKLLMYANNAVPASLTYRHGGISSDNDSIGIFQQRASVYKNIACSMDAGCSAGQFFSQMKRIGGWQTLSVGALCQKIQQSSFPDRYEKQVAAAASICAAGGL

SEQ ID NO: 260 - protein, 137 aa, Verrucosispora maris
GLTQAQMDNAKVIVDVGVDMKIPRKGLVVAVATAMQESTLLNYASGVLPESQNYPHQAIGWDHDSVGLFQQRPSSGWGTVRDLMRPAYSARAFYEALLEVPGWEQMSLTLAAQAVQISAFPYAYAQHEERANTIVAA

SEQ ID NO: 261 - protein, 133 aa, Verrucosispora maris
SGAQVANAVVIVTAGRQRQVPARGYVIALATAMQESTLRNLANANVPESLALPHEGVGRDHDSVGLFQQRPGWGTVRERMTPSYAADRFYEALARVDGWERMRLTDAAQAVQRSAYPEEYQKWEDDAELLAAA

SEQ ID NO: 262 - protein, 142 aa, Beauveria bassiana
NLPGLNALQTKYANAIIAQAKKDGVGAHGCQAGIATAMVESTLVMYANKAVPASLKYPHDRVGSDHDSVGLFQQRASIYKNVKCDMDAACSAGQFFAEMKRINGWQKIAVGTLCQKVQRSAYPDRYAKQVGLATNVCKAGGL

SEQ ID NO: 263 - protein, 143 aa, Thielavia terrestris
GNLPGLNSVQSSHARAIIGEAKKEGVGRHGCEAGIATALVESNILIYANKAVPASLKYPHDAVGSDHDSVGIFQQRAKYYPNIAADMDPARSAAQFFAKMKGIKGWQSMAVGTLCQKVQGSAYPDRYAKRVSEATKICQAGGL

SEQ ID NO: 264 - protein, 137 aa, Micromonospora peucetia
GLTQAQMDNAKVIVDVGVELKMPRRALVVAVATSMQESRLYNLASDVLPESTRYPHQGSGSDHDSVGLFQQRPSSGWGTVRELMRPSYAARAFYEALRDVPGWQQMSVAGAAQAVQVSAFPDAYAQHEGLATTVVAA

SEQ ID NO: 265 - protein, 153 aa, Microbacterium laevaniformans
GSTRTLGATELGHAATILSVARSLGVSARGQQIAIMTALQESGLKMYANSSVPESLDYPHDAVGSDHDSVNYFQQRVSGWGTVEELMDPLYAAKAFFGGEEGPNGGSPRGLLDIPGWEDMGLGEAAQTVQVSAYPTAYDKWEPAAQQIITAVG

SEQ ID NO: 266 - protein, 134 aa, Mycobacterium abscessus
ASRDDYARAIIAEGKRRGITARGIQIGLATAIVESALKMWANEKVPESFNYPHDAVGDDGYSVGLFQQQIVKGPNGWWWADCATCMNPARSAGLFFDRLAKLPYNDALRLPGSFAQQVQQSDFPERYDQRFAEA

SEQ ID NO: 267 - protein, 137 aa, Micromonospora lupini str. Lupac
GLDDDQMENAEAIVRAGRKMGVPRRGLVIAVATAMQESNLYNVASGVLPESQDYPHQGVGWDHDSVGLFQQRSSSGWGPVGRLMDPEFATRQFLTALEQVPGWQQMRLTDAAQAVQVSAYPEHYQQHEWRATRVVDA

SEQ ID NO: 268 - protein, 137 aa, Micromonospora lupini str. Lupac
GLDQVQMDNAKIIVDVGRELKMPRRALVVALATAMQESNLYNLASDVLPESTQYPHQGSGADHDSVGLFQQRPSSGWGTVAELMRPSYAARAFYTALAEIPGWEDMSVTAAAQAVQISAFPDAYAQHEERASTVAAA

SEQ ID NO: 269 - protein, 144 aa, Metarhizium album
AGGLPGLDAVQSGYARSIIAKAKTAGVGRRGCAAAIATGLVESTLMMYANSAVPESLRHHHDRVGSDHDSIGLFQQRASVYRNIACDMDAGCSAGQFFARIKGVSGWHTMATGTLSQTVQQSSYPGRYGAQARAAAAICAAGGL

SEQ ID NO: 270 - protein, 142 aa, Aschersonia aleyrodis
NLPGLNAVQSRYARAIIAEASNDGVGRQGCEAAIATGLVESSIIMYANSKVPASLNYHHDRVGSDHDSVGIFQQRASIYKDIACDMDAACSAGQFFQEMRRIKGWQTMAVGTLCQKVQRSAYPDRYNKRVAEARSICSAGGL

SEQ ID NO: 271 - protein, 139 aa, Metarhizium album
GLTELQSKYARRITAQARKEELGAQGCQAAIATALMESTLIMHANSAVPGSLAFHHDRLGYDGDSVGLFQQRASIYTDLGCSMNAACSAHQFFVEMRDVPDWESMDVGTLCQAVQRSQNPERYYEFIDLAASVCAEAGL

SEQ ID NO: 272 - protein, 139 aa, Cordyceps brongniartii
PGLNHAQSRNAKAAIDQVRAEGLNRQACLAVISTALQESELQIYANPIVPASMNYPHDKVGGDQDSIGMFQQRAKFYSDIATDMSAAGSTRLFLADMKGIAGWQTMEVSALCQTVQKAEAGNLYGQRISLAEQVCSAAG

SEQ ID NO: 273 - protein, 139 aa, Metarhizium rileyi
GLDEVQSKYAGRIIAQVKMENLGPKACQTAITTSLMESTLIMHANERVPESLTYEHERLGYDGDSVGLFQQRALFYTDIKCNMDAVCSAHQFLARMKEIPEWETIDVGTLAQKVQRSEQPERYHQFVDQSVSICNLGGL

SEQ ID NO: 274 - protein, 139 aa, Cordyceps confragosa
PGINEEQSRNAGAAIWQVRNYRLGRQACLAVISTALQESELEVYANPRVPESYKYPHNREGGDQDSVGMFQQRKAYYPDIAADMDPARSTGQFLDAMLRVPGWQNMEISQLDQAVQHAEAGNLYGQRIPLATRICNAAG

SEQ ID NO: 275 - protein, 139 aa, Cordyceps confragosa
PGLNNVQSRNAKAAIGEVRAEGLNRQACLAVISTALQESELQIYANPRVPASMNYPHDKVGGDQDSVGMFQQRAQFYPNIATDMSAAGSTRQFLSVMKGIKGWQTMEISALDQAVQRAQAGNLYAKRIPLAKQVCSAAG

SEQ ID NO: 276 - protein, 142 aa, Cordyceps confragosa
GSYPGLDAVQSRNAAAAIGEVRAEGLNRQACLAVISTALQESTLHIYANPRVPASYNYPHDLEGGDQDSVGMFQQRAQFYPDIGADMSAAGSTRQFLAVMKGIPGWQTMEVSALDQAVQRAEAGNLYAQRLPLANQVCSAAG

SEQ ID NO: 277 - protein, 142 aa, Isaria fumosorosea
GSYPGLDATQSRNAAAAIGEVRAEGLGRQACLAVISTALQESTLHIYANPVVPASMNYPHDLVGGDQDSVGMFQQRPEWYPDIAADMSAAGSTRQFLAAMKQVAGWETMEVSALDQAVQKAEAGNLYAQRLPLANQVCSAAG

SEQ ID NO: 278 - protein, 144 aa, Isaria fumosorosea
AANLPGLNAVQTKYARAIIAQAKKDGVGAHGCQAGIATAMVESSIIMYANNAVPESLKYPHDRVGSDHDSVGLFQQRASIYKNVKCDMNAACSAGQFYAEMKRVSGWKTMAVGTLCQKVQRSAYPDRYAKQVGLATNICKAGGL

SEQ ID NO: 279 - protein, 141 aa, Isaria fumosorosea
IAGLDETQSRHAQAIIDVVKTEGVGALGCQAAIATALTESELYMHANHAVPGSLDKPHDRVGADQDSVGLFQQRAVFYTDVGCTMDAACSAGLFVKDLRAVAGWQGMETAALCQAIQRSQIPDAYIKNVAKAVEVCGGSGL

SEQ ID NO: 280 - protein, 143 aa, Purpureocillium lilacinum
GNLPTLNAVQSKNARAIIAQTKKQGLGRQGCMAALATGLTESQIKILANNKVPASLKYHYDGKGSDHDSVGIFQQRAMYYKDIKCDMDAACSASLFFKGMTAIKGWKTMDVAKLCQAVQRSAVPTAYRKYTSQAKTICAAGGL

SEQ ID NO: 281 - protein, 143 aa, Pochonia chlamydosporia
GNLPTLNALQTKHARAIIAQTKKQGLGRQGCEAAIATGLTESSLRILANRSVPKSLNYKYDGIGSDHDSVGIFQQRAMYYKDIKCDMDAACSASLFFKGMVAVKGWKTMDVAKLCQAVQRSAVPTAYRKYTSAAKSICSAGGI

SEQ ID NO: 282 - protein, 144 aa, Pochonia chlamydosporia
AANLPGLNSLQSGYARAIIAKAKADGVGRHGCEAAIATGLVESSLIMYANNAVPASLKYHHDRVGSDHDSIGIFQQRASIYKNIACDMEAGCSAGQFIAEMKRISGWQTMAVGTLCQKVQRSAYPDRYAKQVPTATKVCAAGGL

SEQ ID NO: 283 - protein, 143 aa, Pochonia chlamydosporia
SGNLPGLNSVQTGHARAIIAQTKKQGLGRQGCEAAIATGLTESGLRILANNVVPASLKYPHDGMGSDHDSVGIFQQRAMYYTDIGCDMDAACSASSFFKGMTAIKGWQTMDVAKLCQAVQRSAVPDAYKKYVGAAASICAAGG

SEQ ID NO: 284 - protein, 143 aa, Penicillium oxalicum
GNLPGLSATQSQHARDIIAEAKREGLGLQGCSAGIATALVESSILIYANNAVPASLNYPHDAVGSDHDSIGIFQQRAMYYPNIAADMDAAKSAAQFFQKMKSISGWQTMAIGTLCQKVQVSAYPDRYAARAADAQNICKAGGI

SEQ ID NO: 285 - protein, 148 aa, Metarhizium anisopliae
TGDLPPRTYSNLSGLQSKYARGIMAQAKREHLGSQGCRAGIATALVESTLIMHANMAVPASLAYDFDRLGKDADSIGLFQQRASIYTNIKCSMDVACSAHQFFKEMKTVPQWKYMPIGQLCQEVQHSENPERYHDFIDQATEICQAAG

SEQ ID NO: 286 - protein, 143 aa, Metarhizium anisopliae
GNLPDLNALQSKYARGIIAQAKKDGVGAHGCQAGIATALTESSLVMYANNAVPASLKYPHDRVGSDHDSVGLFQQRASIYKDVKCDMDAACSAGLFFTEMKRVKGWQTMAVGTLCQRVQRSAYPDRYNKFVPTATKVCKAGGL

SEQ ID NO: 287 - protein, 144 aa, Penicillium roqueforti
SSNLPGLSATQTKHAKAIIAEAKKEGLGRQGCLAGISTALVESNILIYANKKVPASLKYHHDAVAEDYDSVGIFQQRAVYYPNIAADMDAAKSAAQFFKIMKKVSGWKKMNTGKLCQKVQGSAYPSRYQERVPESKKICSAGGL

SEQ ID NO: 288 - protein, 140 aa, Talaromyces islandicus
GNLPGLDSTQSSHARAIIAEAKREKLGHQGCLAGIATALTESSILIYANSAVPASLNYPHDAVGSDHDSVGIFQQRAVYYPNIAADMDPAKSAAQFFAKMKGVSGWQTMNVGELCQKVQGSAYPTRYQEHLSAAESICSA

SEQ ID NO: 289 - protein, 144 aa, Penicillium expansum
SGNLPGLTSTQSKHAKAIIAEAKKENLGRQGCLAGIATGLVESNILVYANKKVPDSLKYPHDAVGSDNDSVGIFQQRAIYYPDIAADMDAAKSAAQFFKGIKNVNGWKTMEVGKLCQKVQGSAYPSRYAERLDDAKKICVAGGL

SEQ ID NO: 290 - protein, 142 aa, Acremonium chrysogenum
NLPGLDSTQTANAQGILEQVGTDDVGLQGCLAGFATALVESNIYIYANEAVPESLNYPYDKMGSDHDSVGIFQQRAMFYPDIAANMDPARSAGQFFDKMVSISGWETMDVGELCQAVQVSAYPDRYAERVEEARAICNAGGI

SEQ ID NO: 291 - protein, 139 aa, Mycobacterium chelonae
STKDRHALATINEGKRLGITPKGICIAIAVELVETNLTMYANSNVPASLGYPHEKVGSDHDSTGLFQQRQAWGPLSETMDPTLSARLFFLGGHSGQRGLTDFDYNSNSRTPGGWAQAVQVSAFPYRYDERYTEAQQIYA

SEQ ID NO: 292 - protein, 121 aa, Mycobacterium sp. TKK
NGKAVIAAGLQMKVPEKGIIIGLAVGMEESGLRNLANSNVPESLGIPHEGVGHDHKSVGIMQQQPWWGSLRDLMTPGVAAQKFFAKLLKVGGWQNMAPTVAAQTVQGSAYPDAYAAFVTQA

SEQ ID NO: 293 - protein, 142 aa, Torrubiella hemipterigena
GNLPTLNSVQSRNANGIIAEVKRRNLGRQGCLAAITTGLTESSIRILANNAVPSSLNYAHDGLGSDHDSVGIFQQRAKYYTNIQCDMTADCSAGLFLAKMAGISGWQTMDVATLCQKVQVSAVPDAYKKYTSQAGTICSAAG

SEQ ID NO: 294 - protein, 142 aa, Torrubiella hemipterigena
NLPGLNAVQTKYANAIIAEAKKVGVGAHGCQAAIATGLVESSIIMYANKGVPASLNYPHDRVGSDHDSIGIFQQRASIYKNIKCDMDAACSAGQFFTEMKKVKGWQTMAVGTLCQKVQRSAYPDRYAKQVGLATKVCKAGGL

SEQ ID NO: 295 - protein, 147 aa, Arthrobacter sp. PAMC
LTAAQVKVARAFIGVGKQLSISDIGLQIAIMVGLQESGLRVLANSSVLASMTFAHDGVGSDHDSVGSAQQRPSAGWGSVADLMSPVYDAQAFFGGTSGPNHGSPRGLLDIPGWKSMPKGEAAQAVQVSAFPELYAQWEGKASSIVAA

SEQ ID NO: 296 - protein, 137 aa, Actinoplanes utahensis
GLNQAQMSNAATIVRLAQERDLPRRAMLIAVMTAFQESSLRNLANSSVPASLDRPHQGVGDDFDSVGLFQQRPSQGWGTVAQLMDPRYAADAFYDRLVEIPDWESLSLGDAAQAVQRSAVPDAYADHEDRAIRIVDA

SEQ ID NO: 297 - protein, 137 aa, Metarhizium majus
LTELQSKYARGIIRQAKKEHLGSQGCMAGIATALVESTLLMHANYAVPDSLVYEYDRLGHDADSIGLFQQRASIYPNIKCSMDVACSARQFFEGMKRVPDWRYMDVGKLCQEVQRSENPERYHEFINQAKGICQQGG

SEQ ID NO: 298 - protein, 137 aa, Micromonospora carbonacea
GLSQLQMDNAKTIVDVGRDMKLPRRGLVVAVATAMQESDLHNLASDVLPESANYPHQGSGSDHDSVGLFQQRPSSGWGTVRDLMRPAYAARVFYEALLEVPGWEEMSLTAAAQAVQISAFPDAYAQHEERATTVVAA

SEQ ID NO: 299 - protein, 131 aa, Mycobacterium immunogenum
LDAGQMEVARKIIEEGLRRGLSPEAIQIALATALTESGLRSLANSSVPDSMMLANDGVGHDHDSVGPFQQRQSWGATADLMDPSRSAGKFYDQLVKVSGWQDMSVAQAAQAVQRSAFPDAYAKYEAQASQI

SEQ ID NO: 300 - protein, 139 aa, Hirsutella minnesotensis
ASKVSGLDPVQSRNADAIIAQAKKDRVGEHGCTAALTTALSQTGIKILANKKVPDSVKYKHDDLGTQGDSVGIFQQSVQKYKDIACVMKADCSAALFFRDIKAVKGWEKMDVTKLLESTNKAGTPAAFKKFEGQAAKIC

SEQ ID NO: 301 - protein, 141 aa, Hirsutella minnesotensis
DLPGLNPTQEAHARAIIGANNQGNYGRQGCLAAITTGLTESKLRILANPKVPASLKYKHDATGTDHDSIGIFQQRASIYKNIACDMDAACSAGQFFKEMKAISGWQTMDVPTLCQKVQRSAFPARYREYLASATAICQAAG

SEQ ID NO: 302 - protein, 143 aa, Penicillium brasilianum
GNLPGLSATQSKHARDIIAEAKREDLGLHGCSAGIATALVESNILIYANKDVPKSLNYPHDAVGSDHDSVGIFQQRAMYYPDIAADMDAAKSAAQFFKKMKNISGWKSMAVGTLCQKVQGSAYPTRYAERVSEAEKICNAGGI

SEQ ID NO: 303 - protein, 143 aa, Tolypocladium ophioglossoides
NLPDLNAVQSAHARSIIDEVKKVGVGMHGCEAAITTGLTEESQSSLRILANKNVPASLNYAHDGLGSDHDSIGIFQQRAMYYKDIACDMKADCSAGLFFNGMKDIKGWQTMDIATLCQKVQRSAYPTAYQKYTGTAAKVCKAG

SEQ ID NO: 304 - protein, 143 aa, Madurella mycetomatis
GNLPGLNSVQSKHARAIIAQAKKDKVGRHGCQAGIATAIVESNILVYANRKVPASMKYPHDAVGSDHDSVGIFQQRARYYPNIAANMDPARSAGQFFAKMKKVKGWKTMAVGKLCQKVQVSAYPDRYAKQVSKAAKICAAGGL

SEQ ID NO: 305 - protein, 144 aa, Aspergillus udagawae
SGSLPGLNAKQSAHAHKVIDEAKKEGLGRQGCLAGIATALVESNLLMYANSKVPASLNYPHDAVGHDYDSVGIFQQRAVYYPNIAADMDAARSAAQFFAKMKNISGWKTMEVGKLCQKVQVSAYPDRYAQRVPAAEKICAAGGL

SEQ ID NO: 306 - protein, 138 aa, Nocardia farcinica
SKKDEYALAILAEGRRRGITPRGIVIAFATVYVECDFIMYANEKVPESLRLPHERVGRDGFSVGLFQQQIVRGAGGAYWWADCATCMDPTLSAGLFFERLARLDYNSNEHSPGWYAQAVQRSAYPHRYDERMKDAQAL

SEQ ID NO: 307 - protein, 137 aa, Micromonospora sp. HK10
GLDQRQMDNAKVIVDVGRAMKMPRRALVIAVATAMQESNLYNLASDVLPESYDYPHQGSGSDHDSVGLFQQRPSSGWGTVAQLMRPSYAAQAFYTALKEVPGWTELSLTAAAQAVQVSAYPDAYAPHEERATTVVAA

SEQ ID NO: 308 - protein, 137 aa, Micromonospora sp. HK10
GLDQAQMDNAKKIVQAGREMGVPRRGLVIAVATAMQESTLLNYASGVLPESQSYPHQAIGWDHDSVGLFQQRPSSGWGTVRELMDPEYATKAFLSALEEIPGWQDLPLTVAAQAVQVSAFPDAYAQHEWRAAQVVGA

SEQ ID NO: 309 - protein, 144 aa, Penicillium murcianum
SGNLPGLSSTQSKHAKAIIGEAKKEDLGRQGCLAGIATALVESNILIYANKDVPSSLNYPHDAVGSDYDSVGIFQQRAKYYPDIAADMDAAKSAAQFFKGMKGVSGWKTMEVGKLCQKVQGSAYPTRYAERVDEAKKICAAGGL

SEQ ID NO: 310 - protein, 147 aa, Micromonospora sp
TGELPRFAEYGDTQIRNAAIIIKVGQDMGVPSRGWVIALATAMQESALRNLANSGVPESLALPHEGVGADHDSLGLFQQRPGWGTVAERMNPAYTARKFYEKLVKVRSWQRRPLTVVAQQVQISAYPDAYAKHEELASTIVDALAGG

SEQ ID NO: 311 - protein, 142 aa, Trichoderma gamsii
NLPGLNAVQTKYANAIIAKAKAEGVGAHGCQAAIATAMVESSIIMYANNGVPESLKYPHDRVGSDHDRIGLFQQPASIYKNIKCDMDAACSAGQFYTEMKKISGWKNMAIGTLAQKVQRSAYPDRYAKQVGLATNVCKAGGL

SEQ ID NO: 312 - protein, 151 aa, Arthrobacter sp. Soil761
LTPRQESVARTYIAVGQQLGIPRSGQIIAIMMALQESSLRMLANPSVPASVQFPNDGVGRDHDSIGSAQQRPAAGWGTVEQLMDASYNARAFYGGPSGPNRGSPRGLLDIPGWQGMDKGLAAQAVQVSAFPELYARWERAATAIVAALEGG

SEQ ID NO: 313 - protein, 144 aa, Arthrobacter sp. Soil761
LTSDQIAVAKGYISVGKQLGVPQEALIIAIMMALQESSLRVLANSNVPASFQFSHDGVGSDHDSLGTAQQRPAAGWGSVEELMDPDYNARAFYGGPSGPNRGSPRGLLDVSGWQSMDKGQAAQAVQVSAFPELYARWESQATAI

SEQ ID NO: 314 - protein, 153 aa, Microbacterium sp. No. 7
GSTRTLTATELGHAATILAVARSLGVSERGQQIAMMTALQESGLKMYANSSVPASLDYPHDAVGSDHDSVNFFQQRVSGWGSVKDLMDPTYAARAFFGGPDGPNEGSPRGLLDIPGWESMSLGEAAQTVQVSAFPDAYDKWEGAAQQIISSVG

SEQ ID NO: 315 - protein, 144 aa, Arthrobacter sp. Soil762
LTARQIAVASDYISVGKQLGVPRDGQIIAIMMSLQESGLRVLANANVPESLNYPHDGVGSDHDSLGSAQQRPAAGWGSIAQLMDSMYNVQAFYGGPAGPNRGSPPGLLDIRGWQSMSKGQAAQAVQVSAFPELYAHWEPQATAI

SEQ ID NO: 316 - protein, 141 aa, Micromonospora halophytica
LPGYGDNQLRNAAVIITVGQEMKVPPRGWVVAVATAMQESRLLNLANRTVAQSRRIPNQGVGADHDSVGLFQQRASWGTVEQRMTPEYAARKFYEKLVQVPGWQTMPLTRAAQRVQISAFPDAYAKHEDLAARIVDALAGG

SEQ ID NO: 317 - protein, 137 aa, Micromonospora nigra
GLTRAQMDNAEAIVRAGREMGVPRRALVIAVATAMQESTLYNVASGVLPESQRHPHQGVGWDHDSVGLFQQRSSSGWGPVGRLMDPEFATRQFLTALLRVPGWQRMRLTDAAQAVQVSAYPGHYARHEGLATEVVDA

SEQ ID NO: 318 - protein, 143 aa, Penicillium patulum
GKLPGLSSTQSKHAKDIIGEAKKEGLGRQGCLAGIATGLVESNLLIYANKKVPASLKYPHDAVGSDHDSVGIFQQRAMYYPDIAADMDAAKSAAQFFKEMKRVSGWKSMDVGKLCQKVQRSAYPSRYADRVGDAKKICAAGGL

SEQ ID NO: 319 - protein, 152 aa, Arthrobacter sp. Leaf69
VTARQMAVAGDYVSIGQQLGIPRDGQIIAIMMALQESSLRVLANVNVPASLQYPHDGLGSDHDSLGTAQQRPAAGWGTVEQLMDPKYNVRAFYGGPSGPNRGSPPGLLDIRGWQSMNKGQAAQAVQVSAFPELYARWEAEATAIVEALDGGM

SEQ ID NO: 320 - protein, 144 aa, Mycobacterium abscessus
NAQVVVAVGEKMHIPPQGIIVALATALQESGLKNYANDGTGQLRGDQQGIASSLQLPHDAVGRDHGSLGIMQQQYPWWGTIQELMTPAIAARKFYEALLKVNNWQNLPVTVAAQTVQGSAFPDAYAAQEPKARALYATYRGAGG

SEQ ID NO: 321 - protein, 137 aa, Mycobacterium canariasense
TKDQVASEFIAEGKRRGITERGIVICIATGLVESNLTVYANSKVPESLSLPHDAVGSDGKSVGPLQQQVVWGNGGWWWGDAATCMDPTRSAGLFYDRLVKKPYQSATSDVAAGAIAQSIQGSAFPDRYATRMAEARQ

SEQ ID NO: 322 - protein, 147 aa, Micromonospora rifamycinica
SGNIPRLGSYGQTQMRNAAVIIKVGQDMRVPPRGWVIAVATAMQESALRNLSNSTVAGSRGIPNEGVGSDHDSVGLFQQRAGWGSVAQRMSPDYAARKFYEKLLKVDGWERMPLTRAAQKVQISAYPDAYAKHEDIASQIVNALAGG

SEQ ID NO: 323 - protein, 137 aa, Micromonospora rifamycinica
GLDRAQMNNAQKIVKAGRAMGVPRRALVIAVATAMQESNLYNYASGVLPESQNYPHEAIGWDHDSVGLFQQRPSSGWGEVGQLMDPAFATRAFLTALLAIPGWEDLPLTVAAQAVQISAYPDLYAQHEWRATEVVAA

SEQ ID NO: 324 - protein, 144 aa, Arthrobacter alpinus
LSESQTKVAKTYIAVGRARGVPNGGIVIALMMGFQESGMQMLANASVPESLNFPHDGVGSDHDSVGSAQQRPSAGWGSVEELMQPAYNAEAFYGGPQGPNRGSPRGLLDIPGWQGLDKGAAAQAVQGSAFPERYAKWQPEAEAI

SEQ ID NO: 325 - protein, 148 aa, Microbacterium hominis
LGHTQLTHAATIITTGSGIEGVGRQGVLIALMAALTESTLRMLANAAHPASLDLPHDGVGGDHDSLGLFQMRPTSGWGSVDQLMDPKYQARAFFGGETGPNFPSPAGLLDIAGWQSADPGAAAQAVERSAFPDRYQRYQPVAEAIISA

SEQ ID NO: 326 - protein, 130 aa, Gordonia phage Obliviate
AITEQAKKMGVSKRGAIIGVATGLVESGDPMKMWANNAVPESLKFPHDEVGSDHDSIGLFQQRQAGWGTVADRMDPHRSAAMFFDALMKVPGWETMDMGAAAQAVQRSAFPGKYAERMPRATELVDKFGI

SEQ ID NO: 327 - protein, 147 aa, Micromonospora rosaria
TGSMPRTFGYGERQMRNAAIIIKVGQDMKVPARGWVIAIATAIQESGLKNYANSTVPESLAIPHEAVGSDHDSVGLFQQRPGWGTVAQRMNPSYSARKFYEKLVKVPDWEKRSLTNAAQMVQISAFPDAYAKHEETASRIVDLLAGG

SEQ ID NO: 328 - protein, 131 aa, Tsukamurella pseudospumae
TPDQVAAAFIVEGLRSGVSERGIVICLATGLVESNLTVYANPADPESLAEPHDAVGSDANSVGPLQQRAPWWGSSARERMNPTLSSRLFYRALRALPYDSPAHSPGWYAQQVQRSAFPDRYDRRITEAQAI

SEQ ID NO: 329 - protein, 137 aa, Micromonospora rosaria
GLTQVQMDNAKVIVDVGADLKMPRRALVVAVATAMQESNLYNLASDVLPESHQYTDQGSGSDHDSVGLFQQRPSSGWGTVRDLMRPAHAAQLFYEALRQIPGWQSLSIAAAAQAVQISAFPDAYAQHEQRASTVVTA

SEQ ID NO: 330 - protein, 142 aa, Tilletia walkeri
GLISGLNAIQTAHAYQIAKAVRAKGLPRQACLAAITTGITEANLLNYANSDVSASFNYQYDAVSSDYDSVGVFQQRVTYYPDVGADMDPQQAASQFLDKMVNINGWENTDVGTLCQDVQGSAYPDRYNENVGQAQDICTAMG

SEQ ID NO: 331 - protein, 142 aa, Tilletia controversa
GLLSGWNALQTAHAYQIAKAVRAKGLPRQACLAAICTGITEANLLNYANSDVAESFNYQYDAVSSDYDSVGVFQQRVTYYPNVAADMDPQSAAAQFLDKMVNINGWETTDVGSLCQAVQGSAYPDRYNEHVGQAQDICSAMG

SEQ ID NO: 332 - protein, 145 aa, Pochonia chlamydosporia 170
NLPGLNALQSKYANAIIAQAKKDGVGPHGLTNYPLYATLTLVQTSIIMYANKGVPQSLNYPHDRVGSDHDNIGLFQLRASVYKNIACDMDAGCSAGLFLDAMRKIKGWERMAIGTLCQKVQRTAYPDRYAKQVGLATNVCKAGGL

SEQ ID NO: 333 - protein, 138 aa, Pochonia chlamydosporia 170
LLEVQQKYAKLIIAQAKKENVGRHGCQTGIATALTESTLIMHANPVVPESLGYPHERLGYDGDSVGLFQQRAIYYTDIKCSMNAKCSAHQFYEIMKKIPDWQNIPVGVLCQKVQISAIPEAYNKFVEQAGSICAAAGM

SEQ ID NO: 334 - protein, 142 aa, Pochonia chlamydosporia 170
NLPGLNDVQSANARAVIDENNKEKLGKQGCIAALTTGLTESSLRILANNGVPASLNYKHDGLGSDHDSIGIFQQRASIYTNIECDMGAACSASQFFKGMTAVSGWETMDVATLCQKVQRSAFPDAYKKWVGTATDACAAAGV

SEQ ID NO: 335 - protein, 141 aa, Purpureocillium lilacinum
NLPGLNAKQSAHARAIIAETKKEKLGHQGCLAAITTGLTESSLRVLANKKVPQSLKYKNDGLGSDHDSIGIFQQRAMYYKDIKCDMDAACSASLFFKGMKAVKGWQKMDVATLCQKVQRSAVPSAYKKHVDAAGKICKAGG

SEQ ID NO: 336 - protein, 144 aa, Paraphaeosphaeria sporulosa
SGTLPGLNSVQTRNARAIIARTKKDFAASQQKRACYVAITTAFQESGIRILANSKYPASLNYPHDGVGSDHDSVGIFQQRPSWGSTKDRMNADLSAHFFFNALKRVRGWQSLAIGVAAQKVQVSAFPDAYNKWVAKAEKVCNAG

SEQ ID NO: 337 - protein, 139 aa, Cordyceps brongniartii RCEF 3172
PGLDAVQSRNAAAAIGQVRAEGLNRQACLAVISTTLQESTLHVYANPVVPASINYPHDLVGGDQDSTGMFQQRPEYYPDIAADMSAAGSTRQFLAAMKQVSNWQTMEVSALDQAVQRAEAGNLYAQRLPLASRVCSAAG

SEQ ID NO: 338 - protein, 134 aa, Gordonia phage Utz
KYPFAITEQAKKMGLSKRAAIIGNATALVEVGDPMKMYANTAVPESLKFPHDAVGSDHDSIGLFQQRQAGWGTVADRMDPHRSAKMFYDALVKVPGWETMDMGAAAQAVQRSAFPGKYAGRMARATELVDKFGI

SEQ ID NO: 339 - protein, 155 aa, Arthrobacter nicotinovorans
SGSMPDGQAVGLSAGQIAVAQGYISVGKQLGVPREAMVIAIMMSLQETTLRMLANANVPASFQFPHDGVGSDHDSVGSAQQRPAAGWGTVAELMDLTYNARAFYGGPSGPNKGSPRGLLDVPGWSAMSKGQAAQAVQVSAFPELYARWEQQATAI

SEQ ID NO: 340 - protein, 132 aa, Mycobacterium conceptionense
TNDAYAREIIRAGRDLGITPRGIVIAFATVYVESNWIMWANAAVPESLAIPHERVGSDGKSVGLFQQQVVWGNGAWWWGSAADCMDPYKSARLFFQRLAKRDYNNGDPGAHAQAIQQSAYPDRYGQRMSEAQ

SEQ ID NO: 341 - protein, 137 aa, Micromonospora narathiwatensis
GLDQRQMDNAKVIVDAGRAMNLPRRALVVAVATAMQESNLYNLASDVLPESYNYPHQGSGSDHDSVGLFQQRPSSGWGTVAELMQPAYAARAFFAALAEVPGWADLSLTEAAQAVQVSAYPDAYAQHEERATTVVAA

SEQ ID NO: 342 - protein, 137 aa, Micromonospora narathiwatensis
GLDGDQMANAVSIVRAGQEMGVPQRGLVIAVATAMQESNLYNYASGVLPESQNYPHQAIGWDHDSVGLFQQRPSSGWGAVRDLMQPAYATKQFLSALLQIPGWQNMALTDAAQAVQVSAFPWAYAQHEWRATEVVDA

SEQ ID NO: 343 - protein, 137 aa, Micromonospora auratinigra
GLDQRQMDNAKAIVDVARAMKLPRRAMVIAVATAMQESDLYNLASDVLPESFDYPHQGSGSDHDSIGLFQQRPSSGWGTVAQIMRPAYAARAFLTALCEVPGWTGLSLTDAAQAVQVSAFPDAYAQHEKRASTVVAA

SEQ ID NO: 344 - protein, 136 aa, Mycobacterium sp. E1747
TADQYAPAVLQAGRDLGITPKGVVIGFATVYVESNWTMYANAKVPESMNIPHDAVGSDGLSVGLFQQQVRDDGNGWWWGDAATCMDPYKSAQLFFSRLKRLDYNSEAQSPGSYAQAIQQSAFPDRYDQRMGDAQSL

SEQ ID NO: 345 - protein, 137 aa, Micromonospora sediminicola
GLDQRQMDNAKAIVDVGREMRLPRRALVVAVATAMQESDLYNLASDVLPESFDYPHQGSGSDHDSIGLFQQRPSSGWGTVAEIMRPAYAARAFFTALAEVPGWEEMSVTAAAQAVQVSAFPDAYAKHEQRAATVVAA

SEQ ID NO: 346 - protein, 153 aa, Microbacterium sp. H83
GSKRTLGPTELNHAATILSIARSLGVSVKGQQIAIMTALQESGLKMYANSSVPASLDYPHDAVGSDHDSVNFFQQRVSGWGTVAELMDPTYATKAFFGGPEGPNQGSPRGLLDVPGWESMPLGKAAQTVQVSAYPDAYDKWETAAQQIITAVG

SEQ ID NO: 347 - protein, 137 aa, Micromonospora coriariae
GLDQAQMDNATAIVRAGQKMDVPRRALVIAVATAMQESNLYNYASGVLPESQNYPHQAIGWDHDSVGLFQQRPSTGWGAVPDLMKPEYATQQFLTALLEVPGWQDLPLTVAAQTVQVSAFGWLYAQHEWRATEVVDA

SEQ ID NO: 348 - protein, 137 aa, Micromonospora citrea
GLDNAQMENAEVIVRTGRKMGMPRRALVIAVATAMQESNLYNVASGVLPESQNYPHQGIGWDHDSVGLFQQRSSSGWGEVGQLMDPAFATRQFLSALAEVPGWQQMRLTDAAQAVQISAYPEHYAKHEWRATEVVEA

SEQ ID NO: 349 - protein, 137 aa, Micromonospora peucetia
IPQYGERQLRNAARIIKVGQEMKVSPRGWVIAVATALQESRLLNLANRTVSESETIPNEGIGADHDSVGLFQQRASWGSVTQRMTPEYAARKFYEKLVRVPGWETMPLSRAAQAVQISAFPDAYAKHEDVAARIVSA

SEQ ID NO: 350 - protein, 147 aa, Micromonospora yangpuensis
TGRMPRSAGYGERQLRNAAIIIKVGQDMKVPARGWVIAIATAIQESGLKNYANSTVPESLALPHEAVGRDHDSVGLFQQRPGWGSVKQRMTPSYSARKFYEKLIQVPNWEKRSLTDAAQRVQISAFPDAYAKHEETASRIVDALAGG

SEQ ID NO: 351 - protein, 137 aa, Micromonospora rhizosphaerae
GLDKAQMDNAEAIVKAGQEMGVPRRALVIAVATAMQESNLYNYASGVLPESQNYPHQAIGWDHDSVGLFQQRPSSGWGSVPDLMKPEFATRQFLTALVAVPGWQDMPLTLAAQTVQVSAFPWAYAQHEWRANEVVNA

SEQ ID NO: 352 - protein, 147 aa, Micromonospora echinaurantiaca
TGKMPRMSEYGESQLRNAARIVKVGQEMKVPPRGWVIAVATAMQESGLRNLANRTVAQSRDLPNEGVGADHDSVGLFQQRANWGSVAQRMTPEYAARKFYEKLLKVPGWQRMPLTTAAQKVQISAFPDAYAKHEALAARIVDALAGG

SEQ ID NO: 353 - protein, 137 aa, Micromonospora inositola
GLDEDQMDNAKAIVRAGRDMGVPRRGLVIAVATAMQESNLYNYASAVLPESQNYPHQAIGWDHDSVGLFQQRPSSGWGTVGDLMRPEYATKQFLTALEQIPGWQDMALTDAAQAVQVSAFPWAYAQHEWRADEVVDA

SEQ ID NO: 354 - protein, 137 aa, Micromonospora inositola
GLDQRQMDNAKVIVDVGRDMKLPRRALIVAIATAMQESNLYNLASDVLPESYDYPHQGSGADHDSVGLFQQRPSSGWGTVAELMRPAYAARAFYAALAEVPGWADLSITQAAQAVQVSAFPDAYAQHEQRATTVVDA

SEQ ID NO: 355 - protein, 137 aa, Micromonospora coxensis
GLTQAQMDNAKVIVDVGVGMGVPRRGLVVAIATAMQESNLHNLASDVLPESFDHPHQGSGSDHDSVGLFQQRPSSGWGTVAQLMRPAYAARAFYTALLEVPGWQDMSVTAAAQAVQISAFPDAYAKHEQRAGTVVAA

SEQ ID NO: 356 - protein, 126 aa, Micromonospora mirobrigensis
GLDETQMDNAKAIVRSAKKMGVPRQAMVIAVATAMQESTLLNYASGVLPESQDYPHQAIGWDHDSVGLFQQRPSSGWGTVEQLMDPEFATQAFLSVLLQVPGWQDMPLTLAAQIVQVSAFPDAYAQ

SEQ ID NO: 357 - protein, 137 aa, Micromonospora viridifaciens
GLDRAQMDNATTIVRTGRDMGVPRRGLIIAVATAMQESNLYNYASGVLPESQNYPHQAIGWDHDSVGLFQQRPSSGWGTVADLMKPAYATRQFLAALEQIPGWQNMALTDAAQAVQISAFPWAYAQHEWRATEVVDA

SEQ ID NO: 358 - protein, 139 aa, Micromonospora haikouensis
VPGVGEWTSAQTTHATVIVSVGRQRRVAPRGYVIALAVAMQESTLRNLANSTVPESLNIPHDAVGSDHDSVGLFQQRPGWGSVRERMTPSYAARKFYEALVDVDGWQRMRLTDAAQAVQRSGTPEAYQKWEDDAEALAA

SEQ ID NO: 359 - protein, 137 aa, Micromonospora peucetia
GLDKAQMKNAQAIVRTGREMEMPRRALVIAVATAMQESNLYNVASGVLPESRNHPHQGIGWDHDSVGLFQQRSSSGWGEVGQLMDPEFATRQFLAALAQVPGWQQMRLTDAAQAVQISAYPEHYAKHEGRATTVVGA

SEQ ID NO: 360 - protein, 137 aa, Micromonospora citrea
GLTQAQMDNAKVIVDVGADLKMPRRAMVVAVATAMQESNLYNLASDVLPESRQYPHQGSGSDHDSVGLFQQRPSSGWGTVRELMRPAYAARAFYEALREVPGWQEMSVAAAAQAVQVSAFPDAYARHEERATTIVAA

SEQ ID NO: 361 - protein, 137 aa, Micromonospora saelicesensis
GLDQAQMDNAKIIVDVGLEMKMPRRALVVALSTAMQESNLYNLASDVLPESAEYPNQGSGSDHDSVGLFQQRPSSGWGTVAQLMRPSYAARAFYTALNEIPGWQDMSVTAAAQAVQISAYPDAYAQHEDRATTVAAA

SEQ ID NO: 362 - protein, 137 aa, Micromonospora echinospora
GLTQRQMDNAKAIVDVGVELRMPRRALVVAIATAMQESDLHNLANDRIAESARYPHQGSGTDHDSVGLFQQRPSSGWGSVRELMQPAYAARVFYRALREVSGWEDMSVTAAAQAVQRSAYPGAYAKHERRATTVVDA

SEQ ID NO: 363 - protein, 137 aa, Micromonospora purpureochromogenes
GLDQAQMDNAKAIVKAGRKMGVPRQALIIAVATAMQESNLYNYASGVLPESQNYPYQAIGWDHDSVGLFQQRPSSGWGEVRDLMDPEYATQAFLSALLEIPGWQDLALTDAAQAVQVSAFPWAYAQHEWRATEVVEA

SEQ ID NO: 364 - protein, 143 aa, Micromonospora echinofusca
SANPPGSAADASWKPAQVGHAATIVRVGAEKDVPSKGWTVAVATAMQESTLRNLANSMVPESLGIPHEGVGRDHDSVGLFQQRPGWGTVVQRMTPDYAAGKFYDALVKVNGWEAMSLAEAAQAVQVSRYPDAYAKWQSEAQRL

SEQ ID NO: 365 - protein, 137 aa, Micromonospora echinaurantiaca
GLTQAQMDNAKIIVDVGVDMKIPRRGLVVAIATAMQESNLYNYASGVLPESQNYPHQAIGWDHDSVGLFQQRPSSGWGTVKDLMRPAYAARAFYEALREIPGWQEMSVTAAAQAVQISAFPDAYAQHEGRATTVVAA

SEQ ID NO: 366 - protein, 131 aa, Micromonospora citrea
SAQSTNAATIVAVGRQRQVPPRGFVIALATAMQESTLRNLANSTVPESLSLPHEGVGRDHDSVGLFQQRPGWGSVRERMTPSYAAAKFYEALVRVDGWQRMRLTDAAQAVQRSGLPEAYQKWEADAEQLAA

SEQ ID NO: 367 - protein, 137 aa, Micromonospora echinaurantiaca
GLTEAQMENAEAIVRTGREMGVPRRALVIAVATAMQESNLYNYASGVLPESQNYPHQAVGWDHDSVGLFQQRPSSGWGPVRRLMEPEFATRQFLSALEQVPGWQRMRLTDAAQAVQISAYPEHYAKHEWRATKVVEA

SEQ ID NO: 368 - protein, 133 aa, Micromonospora pallida
GLSQRQMDNAKTIVDVGVRSRMPRRALVVAVATAMQESNLHNVANDQIAESLRYPHQGTGTDHDSVGLFQQRPSSGWGSVRELMQPTYAASAFYRALREVPGWQKLSVTAAAQAVQQSAYPGAYAKHERRATA

SEQ ID NO: 369 - protein, 137 aa, Micromonospora rhizosphaerae
GLDQRQMDNAKVIVDVGREMKMPRRGLIIAVATAMQESNLYNYASGVLPESQNYPYQAIGWDHDSVGLFQQRPSSGWGTVAELMRPAYAARAFYSALNEVPGWQDLSLTQAAQAVQVSAFPDAYARHEERATTVVDA

SEQ ID NO: 370 - protein, 141 aa, Micromonospora pallida
GPVAGLTVAQMNNAKKIVRAGRAMGVPRRALVIAVATAMQESNLYNLASGVVPESQNHPNQGVGWDHDSIGLFQQRASMGWGTVAQIMDPAYATRQFLTVLLTVPGWQQMRLTDAAQAVQVSGFPEAYAQHESRATVIVNA

SEQ ID NO: 371 - protein, 137 aa, Micromonospora krabiensis
GLTRAQMKNAGAIVRTGREMKVPRRALVIAVATAMQESNLYNYASGVLPESQNYPHQAIGWDHDSVGLFQQRPSSGWGSVGDLMRPEYATRQFLTALEEVPGWQQMPLTDAAQAVQVSAFGWLYAQHEWAATEVVDA

SEQ ID NO: 372 - protein, 137 aa, Micromonospora krabiensis
GLTQAQMDNAKVIVDVGRDLDVPKFGMIIAVATAMQESTLLNYASGVLPESQDYPHQAIGWDHDSVGLFQQRPSSGWGTVAELMRPAFAARAFYLALLEVPGWQDMSLTVAAQTVQVSAFPDAYAQHEDRATEVVEA

SEQ ID NO: 373 - protein, 143 aa, Mycobacterium phage Tonenili
EGRRARSGQGQLDHPVISEKGIVIALATGLVESNLTMYANRADPDSLKYPHDAVGSDANSVGVFQQRAPWWGTLADRMDVARSAAMFYGSLARQRIVDNAGTPNEKRFDYNTDRVSPGTWAQMVQKSAFPDRYDQRMAEARKI

SEQ ID NO: 374 - protein, 102 aa, Mycobacterium phage Tonenili
TIMVESNWIMYANNAVPESLNFPHDAIGSDHDSIGLFQQRPSWGTVAQRMNPRESAGMFLKELAKLDWRNMDRGAACQAVQRSAFPGRYAAQEQAAVEMVRA

SEQ ID NO: 375 - protein, 142 aa, Pseudonocardia sp. SCN 72 86
LDEKQLANAATIITVGTQAGVPAAGLKVALMTALQESKLRMLANSTVPASLDYPHEGVGSDHDSVNMFQQRPHWGKLADLMDARYAVRAFFGGPNGPNGGSPRGLLDIKGWDTMPPGQAAQRVQVSAFPDAYDQWEGAAETI

SEQ ID NO: 376 - protein, 148 aa, Microbacterium pygmaeum
LRRAQLTHAATIITVGSGIDGVGRQGVLIALMAALTESTLRMLANAAHPASLDMPNDGVGSDHDSLGLFQMRPTSGWGTVAELMDARYQVRAFFGGPDGPNYPSPAGLLDIAGWQTADPGTAAQAVERSAYPDRYQNYQPVAESIIAA

SEQ ID NO: 377 - protein, 123 aa, Pseudonocardia sp. SCN 73 27
GFAGPQLANAAAIVSVGVEMGVSQRGQVIAVATAIQESKLLMYANSTVPASLDLPHDRVGSDHDSVGLFQQRAPWGPLQVRMDARGSAKLFYARLLTVPGWQSMPLAQAAQAVQISAFPDAYA

SEQ ID NO: 378 - protein, 145 aa, Mycobacterium phage Lukilu
TQDGIAIGIIAEGRRSRSGEGQLDHPVMSAKGIVIALAVALVETNLKMYANRSDPESLNFPHDAVGSDANSVGVFQQRAPWWGTVADRMDVARSAAMFYNSLYRQRVGGADYNTDRVSPGTWGQMVQQSAFPDRYDKRMAEARQI

SEQ ID NO: 379 - protein, 147 aa, Micromonospora avicenniae
SGKMPRLADYGDSQLRNAARIIGTGQKMKVPPRGWVIAVATAMQESRLRNLANRTVGESQGLPNEGVGADHDSVGLFQQRASWGTVRQRMTPEYAAKKFYEGLLDIPDWEQLPLTEAAQRVQRSAFPDAYAKHEAVAAQIVDALAGG

SEQ ID NO: 380 - protein, 127 aa, Mycobacterium abscessus subsp. Abscessus
SKDDYARAIIAEGKRRGISPLGIQIGLATVYVESDFIMYANEDDPESLNYPHEALSEDANSTGLFQQRAPWWGTVADRMDATRSAGLFFAALAKLDYNNPARSPGSYAQAVQKSAFPDRYDKRFNDA

SEQ ID NO: 381 - protein, 140 aa, Mycobacterium abscessus subsp. Abscessus
AGTVGDLDGRQTQVAKDIVAEGLRRGIPFKGLVIGVATALQESSLRELANPSVPESMQIPHDGVGKDHDSVGPFQQRQSWGATADLMNSRTSAGKFFAALQKVAGWQNMSHTEAAQAVQRSAFPSAYAKHVAHADRIVRA

SEQ ID NO: 382 - protein, 121 aa, Mycobacterium abscessus subsp. Abscessus
NGKAVIATGLQMKIPEKGIIVALATAMQESGLKNYANPNVPESMQIPHEAVGHDHASVGIFQQQPWWGSIKDLMTPGVAAQKFYAALLKVGGWESMAPTQAAQAVQRSAYPDAYADDVPAA

SEQ ID NO: 383 - protein, 137 aa, Micromonospora avicenniae
GLTRTQMKNAEIIVRTGRGMGVPRRGMVIAVATAMQESNLYNLASGVIPESQRHPHQGLGWDHDSVGLFQQRSSSGWGPVDRLMDPEFATRQFLGALERVPGWQQMRLTDAAQAVQVSAYPDYYAKHEWRANEVVDA

SEQ ID NO: 384 - protein, 134 aa, Mycobacterium abscessus subsp. Abscessus
LNERQMEIARTIVAEAQRRGLSPFAAKIALATGLTESGLRNLANSNVPASLNILNDGVGKDHDSTGVFQQRQSWGATRELMTPMLAAGKFYDALVKVPGWEHMSLAAAAQSVQRSAFPSAYAKYEQQANQVYQA

SEQ ID NO: 385 - protein, 127 aa, Mycobacterium abscessus subsp. Abscessus
SKDDYARAIIAEGRRKGITPRGIQIGLATVYVESDFIMYANEADPDSLNYPHEDLSEDENSTGLFQQRAPWWGTVADRMDAARSAGLFFAALAKLDYNNPSRSPGSYAQSVQQSAFPDRYDQRFNDA

SEQ ID NO: 386 - protein, 130 aa, Mycobacterium abscessus subsp. Abscessus
QMQVAKSIVAEGVRRHLPPKAMQIAIATALQESGMRSLANPNVPASMQIPHQGVGRDHDSVGPFQQRQSWGATADLMNPATSAGKFYDKLVRIPGWQEMPLTQAAQRVQVSAYPNAYAKHTGPAGQIVAA

SEQ ID NO: 387 - protein, 135 aa, Mycobacterium abscessus subsp. Abscessus
SKEDGYARAIIAEGKRRGISPRGIQIGLATVFVEAALKMWANEKVPESLEFPHDDVGYDGYSVGLFQQQVVMGLNGQWWWADCATCMNPTLSAGLFFDRLAKLPYNDTSRSPGSFAQDVQQSAYPDRYDKRFAEA

SEQ ID NO: 388 - protein, 127 aa, Pseudonocardia sp. Ae717_Ps2
IEGLGPEQVSNAGLIVATGVEMDVPRHGRVIALATAMQESSLKNLANSNVPQSLELPNQGVGSDHDSVGLFQQREAGWGDVATRMDPRQSARLFYNALLQVPGWESLPVTRAAQLVQISAFPDAYAK

SEQ ID NO: 389 - protein, 146 aa, Ovatospora brasiliensis
GGKGNLPGLNAKQSSHARAIVAQAKKDGVGLHGCEAGIATALVESGIKVYANKKVPASLKYPHDAVGSDHDSIGIFQQRAVYYPNIAADMDPARSAHQFFAKMKGVSGWKTMAVGKLCQKVQVSAYPDRYAKRVSEATKICKAAGI

SEQ ID NO: 390 - protein, 352 aa, Piromyces sp. E2
GTVYKCKVTKTDIKSGAGSNYPYIGWLDKDNYIYVTNVTNGWAEFHVGWVNINDLTKQNSSTYNYKVNSDALNFREGPSINHNRIALLNKGTKVIYYGRDSWNNSWGVTNRGYCSMEYLSELSTNTTVISSTKTNVIQPSTYKSISREIINISRWNTVTNYASAASAIDGVIIRCGYRGYGSQGSLVKDSMLENHYKGFKDKTKIGYYFFSQAITVKEAEDEATYVVNTLIKGKQNNFPIYWYSESSGAPGNSGRADNLSKSVRTACAVAFVMKVKALGYRAGIYASEYWFNDNLDYNKIVNAGASIWVAKYSSEKPITSSYDSWQYSSTSYVKGISGNVDKSYVYKNIANW

SEQ ID NO: 391 - protein, 258 aa, Ochrobactrum lupini
CTTVDYDFSDVKKSGSSVARIAPPSGSVKAPRFGDRDPHDWTGKTPWHYPIHGTDVSKYQTNIDWSAVRASGISFAFIKATEGGDRVDDRFKEHWNGAHQAGIARSAYHFYYFCRPAIEQARWYIQNVPRDPSALPPVLDMEWNPQSPTCKLRPNAAVVRKEMRIFLQALEKHYGKRPIVYTTVDFFDDNDLRQMADYPFWLRSVAGHPDEKYGPHPWTFWQYTGTGSIPGIKGDADINVFAGDANSWKKWLESNKVR

SEQ ID NO: 392 - protein, 243 aa, Thielavia australiensis
YLISGDGVNCRSGPGTSYAVKKVYAKGTDVKISCQTGGTTVNGNSIWDKTQDGCYVADYYVKTGTNGYVTGKCGVSTCTAPKSNQATVDLIASFEGFVPNVYTDATGNPTVGYGHLCQKPNCAEVPYPIPLSQADGKKLLADDMKKFETCITSLFNNKVTLNLNQYGALVSFSFNLGCAATEGSQLAKRLENGENVNTVISEEFPKWVHGNGGTVLQGLVRRRNAEIALAKTATSDKALPAKC

SEQ ID NO: 393 - protein, 245 aa, Penicillium simplicissimum; identical to SEQ ID NO: 217

SEQ ID NO: 394 - protein, 263 aa, Chaetomium thermophilum var. thermophilum; identical to SEQ ID NO: 196

SEQ ID NO: 395 - protein, 204 aa, Mortierella alpina; identical to SEQ ID NO: 7

SEQ ID NO: 396 - protein, 267 aa, Chaetomium sp. ZY287; identical to SEQ ID NO: 207

SEQ ID NO: 397 - protein, 264 aa, Mortierella sp. ZY002; identical to SEQ ID NO: 209

SEQ ID NO: 398 - protein, 268 aa, Geomyces auratus; identical to SEQ ID NO: 213

SEQ ID NO: 399 - protein, 225 aa, Zopfiella sp. t180-6
MKSILLSAASLIGAAQAAVQGFDVSHWQSSVNFAAAYNSGARFVIIKATESNNYIDPKFNTYYPAATSAGLIRGGYHFAHPGETTGAVQADYFIAHGGGWSSDGITLPGMLDLENASGYPACWGLSQSAMVSWIKAFSDRYKARTGVYPMLYTNPSWWTSCTGNSNAFVNTNPLVLARYASSPGTIPGGWPYQTIWQNSDSYTYGGDSDIFNGDLAGLKRLAKGS

SEQ ID NO: 400 - protein, 272 aa, Metarhizium iadini
MKVLVAANLLAMTATMVTAFPVTTDSLNCRAEPNTSSAVKKTYKKSADVKISCQTEGPSINGNSIWDKTQDGCYVADYYVKTGSSGYVTGKCGGGGGGGSNPPPSGGFCKTLNKAGTDLITRWEGFVDRPKPDPIGLPTVGYGHLCQKKNCAEVKYKFPLTKATALQLLNDDLPNYTKCLGKALNTGKVKLNDNQWAALTSWVFNVGCGAAQSSTLAKRLNNGENANTVASEELPKWKMGGGKVLPGLVKRRADEVKLFKTASSKTAFPTCQ

SEQ ID NO: 401 - protein, 258 aa, Trichocladium asperum
MKFAIIAALAPILANAYLITGTTVNCRSGPGTSYAVKKSYTKGQDVKISCQQAGTSVEGNNIWDKTQDGCYVADKYVKTGVDGYVTSKCGVTTCTAPKVNAATVDLIAEFEGFRANIYTDATGHPTVGYGHLCTQSKCAEVKYKIPLSQADGKKLLADDIKKYEKCVTSMAKSKAKLNANQYGAVVSFTFNLGCGAAEGSQMMKRLNNGENPNTVIANEFPKWVHGNGAVLPGLVRRRNAEIALAKKATSTAALPPKC

SEQ ID NO: 402 - protein, 229 aa, Podospora bulbillosa
MKLLPLSTTLLPVALLATEASAAVQGFDISHYQSSVNFQAAYNSGARFVIIKATEGTTYIDPKFSSHYTGATNAGLIRGGYHFAHPDSSTGAAQADFFLAHGGGWSGDGITLPGMLDLESVSGKATCFGLSASSMVAWIKSFSDRYHTRTGRYPMLYTNPSWWTTCTGNSNAFVNTNPLVLARYASAPGTIPGGWPYQTIWQNSDSYTYGGDSDIFNGALSGLQKLASG

SEQ ID NO: 403 - protein, 226 aa, Lecanicillium sp. WMM742
MKSFGLFASLASLAGIASASVQGFDISHYQSSVNFGAAYADGARFVIIKATEGTTYRDPKFSEHYGGATKAGFIRGGYHFAQPASSSGAAQANFFLAHGGGWSGDGITLPGMLDLEYGPNGNTCYGLGPASMRSWISDFVETYHAKTGRYPLIYTSTSWWKTCTGNTSLFADKCPLVVARYNSQVGELPAGWGFYTFWQFNDHYKHGGDSDVFNGAYSQLQKIATG

SEQ ID NO: 404 - protein, 225 aa, Pycnidiophora cf.dispera
MKSVLALLAAGAQLASAAVSGMDISHYQGTNYNFAGAYSSGARFVIIKATEGTTYTDPQFSANYIGATNAGFIRGAYHFARPAASTGAVQASYFVSHGGGWSSDGITLPGMLDMEYGSTSTCHGLSVSAMNTWIASFVNQYKSLTGAYPMIYTTADWWKTCTGDSTAWNTKCPLVLARYSSSVGTIPGGWPYHTIWQYSDSYAYGGDSDTFNGDLAGLKRLAKGS

SEQ ID NO: 405 - protein, 225 aa, Crassicarpon thermophilum
MKAALLATVSALAAGVQAAVQGFDISHWQSSVDFKAAYNSGARFVIIKATEGTSFIDPKFSSHYTGATNAGFIRGAYHFAHPGQSSGEAQADYFLAHGGGWTPDGITLPGMLDLEAYNAGECWGLSQSAMVAWIKAFSDRYHARTGVYPMLYTNLSWWKTCTGNSKAFVNTNPLVLARWASSPGEIPGGWPWQTIWQNSDSYRYGGDSDIFNGDMNQLRRLATAA

SEQ ID NO: 406 - protein, 223 aa, Paecilomyces sp. XZ2658
MKSVAVFAGLASMVSIATATVAGFDISNYQPSVNFAKAYADGARFATEGTTYIDPSFSSHYTGATNAGLIRGGYHFAHPGSSTGAAQATYFLAHGGGWSKDGITLPGMIDLEYNPSGATCYGLSTSAMVSWISDFVETYHSKTGVYPLIYTSTSWWNQCTGSSTAFASKCPLVVARYASSVGTLPAGWGYQTIWQNSDSSPWGGDNDIFNGSLDQLKRIANAS

SEQ ID NO: 407 - protein, 222 aa, Daldinia fissa
MKTFITSCLGLAGLASLALAAVPGFDISHYQSSVDFGAAYSSGARFVIIKATEGTTYQDPKFSSHYAGATNAGLIRGGYHFARPASSSGAAQATFFLAHGGGWSGDGITLPGMLDLEGDCAGLSTSAMVSWIRDFSDTYHGKTGRYPLLYTNPSWWSSCTGGSSAFVNTNPLVLARYASSPGALPGGWPYYTIWQFNDAYKYGGDSDTFNGDLTQLKKLASG

SEQ ID NO: 408 - protein, 277 aa, Ochrobactrum lupini
MNRLASCSILALGALLLSACTTVDYDFSDVKKSGSSVARIAPPSGSVKAPRFGDRDPHDWTGKTPWHYPIHGTDVSKYQTNIDWSAVRASGISFAFIKATEGGDRVDDRFKEHWNGAHQAGIARSAYHFYYFCRPAIEQARWYIQNVPRDPSALPPVLDMEWNPQSPTCKLRPNAAVVRKEMRIFLQALEKHYGKRPIVYTTVDFFDDNDLRQMADYPFWLRSVAGHPDEKYGPHPWTFWQYTGTGSIPGIKGDADINVFAGDANSWKKWLESNKVR

SEQ ID NO: 409 - protein, 225 aa, Acremonium chrysogenum ATCC 11550
MKFTILAGLAALASMAQAAVPGFDISHWQSTVNYKGAYNSGARFVMIKATEGTTYKDPKFSTHYIGATNAGLIRGGYHFAQPASSSGAAQANFFIKNGGGWSSDGITLPGMLDMEYNPSGSACYGLSASAMVNWISDFVETYKSSQGVYPLLYTSTSWWTQCTGNSAAFGNKTPLVIARYSSSVGTLPAGWSVYSFWQFNDSYQYGGDSQTFNGSLDQLKKIAKG

SEQ ID NO: 410 - protein, 237 aa, Metarhizium iadini
MKTSGAISLGLAALVSSAAASPVELEQRAASVKGFDISGYQPNVDFNKAYADGARFVIIKATEGTTYIDKTFSKHYTGATKAKLIRGAYHFAHPGQNKASAEADFFVQHGGNWSKDAITLPGMVDLESEKGHPPCWGLSHSAMVAWISEFVAAYHKKTTRYPMLYTNPSWWSACTGNSKAFKDTCPLVLARYASSPGAIPGGWPAQTIWQNSDKSPWGGDSDMFNGDLAQLKKLATG

SEQ ID NO: 411 - protein, 222 aa, Simplicillium obclavatum
MKLATVLNVLALAVSSVIGAPKGIDVSHWQGSINWGAVKANGIEWAYIKATESTNYKDPNFNANYVGATNAGLIRGAYHFARPGDSSGAAQANYFASNGGGWSADGITLPGAVDLEAGCSGLSQSAMTAWIKDFSNTYHARTGRYPAIYTTTSWWKQCTGNASGFQNNNPLWIARWASSVGELPAGYSYHTFWQYADHGPNPGDQDVFNGDSAGLKRMAKGS

SEQ ID NO: 412 - protein, 250 aa, Ovatospora brasiliensis; identical to SEQ ID NO: 227

SEQ ID NO: 413 - protein, 230 aa, Thermoascus aurantiacus
MKIAPLLLAGLAAAAPELDKRARGVQGFDISHYQPNVDFKGAYNSGARFVIIKATEGTTYKDPAFSKHYIGATEAGLIRGGYHFAHPDKSSGAAQANFFLAHGGGWSGDGITLPGMVDLEYNPSGDACYGLSDSQMVSWIRDFVNTYHAHTGRYPMIYTTADWWKRCTGDSHAFSTTCPLVLARYNSSPGTVPGGWPYHTIWQNSDKYRFGGDSDIFNGDLAGLKRLAKG

SEQ ID NO: 414 - protein, 652 aa, Penicillium brefeldianum
MFYPGCTSCLRALLVALLTLGPANAAPTAGRANSPPVVLPIPQEISSSGKGVSLVGGTVTIVTGNATDSATLDTIKAIVSSAGGNAVVSAEPTGHGSQIVIGTESENDNAAAIAKALTGNSADGLLADGYVLASGDYKGQPSIVLNGVDKRGTFYAAQTLRQLGAGHYVPGVKIRDWPLMSIRGSIEGFYGEPWSHQARLDQFVFYGKHKMNTYIYTPKDDPLLRANWRTLYTGDALSQLQELIDTANTNHVDFTFALSPGLDLCYSSDADFNATITKFDQVRKLGARSFYIAFDDIPLAFHCDSDKQKWVDTGNWHWLADAQAYYLNRIQEEYVIPKGLKDLETVPTNYAGSAPDPYKGEFGTMLNKNISIQWTGEGVFSDQINDTSVQRADSTYVTDKLFLWDNFPVNDGNRNRLFLNPLTGRSPDLYKYLLGFTSNPMEEAYASMPALANYGDYMWNGPKYNADDSMAAILWELAGSDRTVHDALLAFVDVNQNWPYRSPQVHSPQLSKDIAAFWAARETSPKAKHGYANGESALINRLALLTTLPDVLPRMAMKGFANDVAPWSTVAKQWAKACQHLITMLHALDDGDQTKADTEFKAAHEWVNKTKAKTVNDRNDQGVELPNSITPITGDGSFDLFLANATAIYDGQ

SEQ ID NO: 415 - protein, 450 aa, Trichoderma harzianum
MKLLPSLIGLASLASLAVAAPSLIPRVSPFSIAKPGGVDDIVITANNTLNGTYHSSTTVSKNVIQTRAQAGHLPIQLVNNFSGSQVNAYISGLDTDNRVVFVRGDGSLVYPSSGGSSVPVAISTPINIALPAQGQSITVNVPIVISSARIYFSVGDLQFFMVKIPNGDGLVQPSQFNLQDPSAGLLWGFVELTYTTDLAVYANISYVDFVGMILSMSLSATDGSATQTTKGLGSSALTQICQGLVQQASVDGFPWSSMCIANSAGTLVRALSPGDYSVINAAAFQNYWSAYVDQVWSQYTNTPLTINTQTSAGSVNCQVSGDTLNCNGDNRGYAKPAAGDIWGCNSGPFAIQSGDNAVHSAVVPRLCAAFVRSTLLLAGGNVQPGLGQSSYYTVSPTNHYSRLVHQFEIDGRGYAFPYDDVNPDGNENASGTLASGAPNVLTVYVGAPPS

SEQ ID NO: 416 - protein, 424 aa, Trichoderma harzianum
MLSFLGKSVALLAALQATLSSASPLATEERSVEKRANGYANSVYFTNWGIYDRNFQPADLVASDVTHVIYSFMNLQADGTVISGDTYADYEKHYADDSWNDVGTNAYGCVKQLFKVKKANRGLKVLLSIGGWTWSTNFPSAASTDANRKNFAKTAITFMKDWGFDGIDIDWEYPADATQASNMILLLKEVRSQLDAYAAQYAPGYHFLLTIAAPAGKDNYSKLRLADLGQVLDYINLMAYDYAGSFSPLTGHDANLFNNPSNPNATPFNTDSAVKDYINGGVPANKIVLGMPIYGRSFQNTAGIGQTYNGVGSGSWEAGIWDYKALPKAGATVQYDSVAKGYYSYNSATKELISFDTPDMINTKVAYLKSLGLGGSMFWEASADKKGADSLIGTSHRALGGLDTTQNLLSYPNSKYDNIKNGLN

SEQ ID NO: 417 - protein, 575 aa, Streptomyces griseus
MERSAGSSRRRRRSRPVLGGTMAVVAAAALTVTGLVSTAQAADVNNARNAGFESGLANWTCAGNSGAIVSSPVHGGTSALKATPAGQDNAKCSQAVKVKPNSTYALSSWVQGGYAYLGVSGTGTTDVSTWTPGSTTWTKLSTSFKTGANTTSVTVYTHGWYGQAAYLADDFEVTGPDGGGGEEPGPVIPAAPGGLAAGATTTSSVSLSWNAVSGATGYTVYRDGTKATTSTGTSATVTGLTADTAYQFSVSATNAAGESVKSAAISARTAKQGTGPGPGPSVPKHAVTGYWQNFNNGAAVQKLSDVPADYDIIAVSFADATATQGAVTFNLDTAGLNGYTDAQFRSDIKAKQAAGKNVIISIGGELGTVRVDSDASATAFSNSVYALMQDYGFNGVDIDLENGLNSTYMTKALRQLSAKAGSGLVITMAPQTIDMQSTSGEYFKTALNVKDILTVVNMQYYNSGSMLGCDGKVYSQGSVDFLTALACIQLEGGLDPSQVGIGVPASTRGAGSGYVSPSIVNAALDCLAKGTNCGSFKPSKTYPSLRGAMTWSTNWDATAGFAWSKAVGPHVRSLP

SEQ ID NO: 418 - protein, 760 aa, Trichoderma harzianum
MLKLTALVALLLGAASATPTPSPPASDEGITKRATSFYYPNMDHVNAPRGFAPDLDGDFNYPIYQTVNAGDGNALQNAITTDGKGGSRHPQWFASQPRVVYIPPGTYTISKTLRFNTDTILMGDPTNPPIIKAAAGFSGDQTLISAQDPSTNEKGELSFAVAIKNVVLDTTAIPGGNSFTALWWGVAQAAHLQNVRITMSSSSGGNGHTGIRMGRGSTLGLADVRVERGQNGIWIDGHQQASFHNIYFFQNTIGMLISGGNTFSIFSSTFDTCGTGISNTGGSPWIALIDAKSINSGVTFTTNQFPSFMIENLTKDNGTPVVVVRGSTLVGASSHVNTYSYGNTVGRNPTYGDVTSSNTRPGALAPGGRYPYVAPPTYGDLPISSFLNVKDPAQNGGRTVKGDNTIDEAATLNAILELAASQNKVAYFPFGKYRVDSTLFIPKGSRIVGEAWATITGNGNFFKNENSPQPVVSVGRAGDVGIAQIQDMRFTVNDVLSGAIVVQFNMAGNNPGDVALWNSLVTVGGTRGASALANACTNNSNECKGAFIGIHVAKGSSPYIQNVWNWVADHIAENFSGGTSIAGKGGILVQSTKATWLYAIGSEHWWLYQLNLHNAANVVVSLLQAETNYHQGANTQQIPPAPWVANIGTWGDPDFAWCNGGDKRCRMGPANFINGGSNIYTYASAAWAFFSGPGQGCAQFECQQTMHWIASTPSNLQAFGLCSKDSVNTLRLGDGTFINTQNGYTGGWTPGGGDVGRYTT

SEQ ID NO: 419 - protein, 408 aa, Trichoderma atroviride
MLSAYAFSLLVASASAWTPQSNAKVFSRDTEGVMRWLPGNDKFRGVNLGSQFIIEPWMASDEFSGMGCGGLNDEWSCVQSLGQDAADAAFQKHWDSWITQDDITQIKNLGLNTVRIPVGFWIREDLVQQGEFFPRGGIQYLDRLVGWCNDAGIYVIMDLHGGPGAQFPNQQYTGHGVSQPGFYTEANYERAANFLEWMTERIHTNATYASVGMLEVINEPVHSGDFPSQAADMVNTYYPLAWNRIRDTESKLGVSDDKRLHIQFMASAWGSGDPTSALPSTDFAAFDDHRYLKWDTSVTATKDGYLNAACSDKRDDNVIVGEWSISVADNVQDNDELGIKNRSDQADWYQKFWAAQVLAFEKSAGWVFWTWKCNWITGYDDWRWCYQSAVAAGAIPKDAGSAASINPC

SEQ ID NO: 420 - protein, 317 aa, Fusarium solani
MVAFSRIAVTTLALGGSTAQAKPATAARATGLADFKPGVQWEICIHHPIKHDSAADLIPTKAKVWDIDMGHAQEFPNMIPMLKSAGKFVICYFNAGALQDWDDDKSKFPKEVIGHSLSYPYDSEEWYLDIRDSRVLELQTARLDIAAKIGCDAVDPDNVDAWQQDDEDPTGFKLKSSDYTNYLKNLAKYAHSIKTKDGQPLLVGQKNAPEIAEDLVSTLDFAVLESCRGNSDPNEESWPFCEDFQTYIDAGKPVLQIEYPPSVEKTGKVSASDNKYYCTAEDEDKGFSKIIKWASAQLDGWGQYCGEEPFRTPAAKY

SEQ ID NO: 421 - protein, 346 aa, Parengyodontium album
MSRLLEASLVLLPLLSTLAGAAPATVSARAETCALKGKPSGKVLQGYWENWDGAKNGVHPPFGWTPIQNPQILQHGYNVIQAAFPIIMPDGTAKWEDGMDRDVKVASPTEMCEAKANGATILMSIGGATAAINLGSSAVADKFISTIVPILKKYNFDGIDIDIESGLTGSGNINQLSTSQSNLIRIIDGILAQMPANFGLTMAPETAYVTGGSVTYGSIWGAYLPIIKKYADNGRLWWLNMQYYNGEMYGCKGDSYKAGTVEGFIAQTDCLDKGLVVQGTTIRVPYDKQVPGLPAQQGAGGGYMAPSLVAQAWNHYGGKLKGLMTWSINWDGSKGWTFGDNVKGLF

SEQ ID NO: 422 - protein, 624 aa, Streptomyces griseus
MSTDTPQRRSRFRWIPVRSGRSKVVAGLTALVVPLAAMVGLAAPASAAASATATYTKKSDWGSGFEGQWTVKNTGTTALSSWTIEWDFPSGTTAGSAWDAALTSSGGHYTAKNLSWNGSVAPGASISFGFNGTGSGSPTGCKLNGASCDGGPTVPGDNPPTAPGAPTTSDVTDTSVKLSWSAATDDKGVKNYDVLRDGAKVATVTGTTYTNTGLTAGTDYSYAVQARDTADQTGPVSGAVSVRTTGGGGEQPGGDKVNLGYFTNWGVYGRNYHVKNLVTSGSAAKITHINYAFGNVQNGKCTIGDSYADYDKAYTADQSVDGVADTWDQPLRGNFNQLRKLKAKYPHIKILWSFGGWTWSGGFGQAVQNPAAFAQSCYDLVEDPRWADVFDGIDLDWEYPNACGLTCDTSGPAALKTMADAMRAKFGTKNLVTAAITADGSNGGKIDAADYGGASQSFDWYNVMTYDFFGAWAAKGPTAPHSPLTPYTGIPQAGFSSSEAIAKLKAKGVPAKKLLLGIGFYGRGWTGVTQSAPGGTATGAAPGTYEAGNEDYKVLKNTCPSTGTIAGTAYAHCGTNWWSYDTPATIGTKMTWAKNQGLGGAFFWEFSGDTSNGELVNAIKTGLQ

SEQ ID NO: 423 - protein, 575 aa, Streptomyces griseus; identical to SEQ ID NO: 417

SEQ ID NO: 424 - protein, 362 aa, Kribbella ginsengisoli
MKMPRFVRVLPVLAALGVVLSMLVTAPAEARVQAPTATTACNYPNWVAGANYVTGNVVKYTNGLYYIAEHDNPGYDPTISTWFWDPFSCDGGTTPPACNYPNWVAGANYVTGNIVKYTNGLYYIAEHDNPGYDPTISTWFWDPYTCNGGPTDPPPTGSFPVSESQFNSMFPSRNSFYTYSGLVSAAAAFPGFTKTGDDATRKREAAAFLANVNHETGGLVYIKEINTANYPNYCHPELPYGCPAGQSAYYGRGPLQLSHNFNYKAAGDYLGIDLLGNPYQVEQNATVSWKASLWYWNTQSGPGTMTPHNAMVNGAGFGETIRSINGSIECNGGNPGQVQSRVDAYNRITGILGVSPGSNLYC

SEQ ID NO: 425 - protein, 259 aa, Thermothielavioides terrestris NRRL 8126
ASGSGQSTRYWDCCKPSCAWPGKAAVSQPVYSCDANFQRLSDFNVQSGCNGGSAYACADQTPWAVNDNLAYGFAATSIAGGSESSWCCACYALTFTSGPVAGKTMVVQSTSTGGDLGSNHFDIAMPGGGVGIFDGCSSQFGGLPGDRYGGISSRDQCDSFPAPLKPGCYWRFDWFQNADNPTVTFQQVQCPAEIVARSGCKRNDDSSFPVFTSPSPSPSPSPCTTQGWGQCGGIGYTGCTNCVAGTTCTQLNPWYSQCL

SEQ ID NO: 426 - protein, 256 aa, Cordyceps farinosa
MLVTSLASLAALSGIAAAAGPVRASIPTNVDGAKYNKPNAGPPGEWFSGDASLPIAKIASAVGKMTQTPKDASYILSNDNHKKATIHSDWTKLSKGAAYAFVADMDVDCDGIDSGCKGNDDGQKTTNFGALAAYEVPFVVIPDKFQSEHQDELAGNNLVAVICNGKLYYGVFGDTDGDSPQEIGEASWLIANTCFPSEGLNGGKGHTDADVTYIFFTGDDSVLPSSAIGKNYLTNFQALKSLGDKLMKDLVSSLHL

SEQ ID NO: 427 - protein, 423 aa, Streptomyces griseus
MFKLHRPRARLRALAAAACTAALGATLLGVAGMSPAGATPAAQSAASPAAAEAAPTAAGDKVIGYFTNWGTYDRNYHVKNIETSGSADKLTHINYAFGNVIGGKCTIGDSYADYEKAYTADQSVDGVADTWDQPLRGNFNQLRKLKKLHPDLKILWSFGGWTWSGGFGQAAQNPAAFAKSCRDLVEDPRWADVFDGIDIDWEYPNACGLTCDTSGRDAYGNLLGELRKSFGTDLVTSAITADGSDGGKIDAVDYAGAAKHLDWYLPMTYDFFGAWEAKGPTAPHSPLTSYPGVPTEGFNSDAAISKLKSLGIPPEKLLLGIGFYGRGWTGVTRSEPGGSATGAAAGTYEAGIEDYRVLKNSCPATGKVAGTAYAHCGTDWWSYDTPETIGSKMNYKNEQGLGGTFFWELSGDTGNGELIKAIR

SEQ ID NO: 428 - protein, 429 aa, Trichoderma harzianum
MKYSIVAPAILAGTGFAWLPQDRDLKAFNQTPRFEELGKRFEPALASGITKIRGVNFGGWLISEPWMMSNEWNNNMGCNGAASEFDCMRNNYMGSKRATGNTKFQNHYRDWINPATVQSVHDVGLNTIRIPIGYWSYNAIVDTASEPFADGNLQLPYLDAVVQKAADLGIYVIIDLHGAPGGQQQDAFTGQNPNPAGFYNTYDYGRAEKWLSWMTNRIHTNPAYSTVGMIEVLNEPVSRHDGGGRYPAPGQDPSMVQTYYPGALKAVRDAEAALNVPSNKKLHVQFMSSKWDSGDPRSNAAVKNDPMVGFDDHNYIGFALQNTGDQYSLMHSACTDSRVVSGQDFAITGEWSMTSGADWHDGNFFTKFFTAQQQLYESPGMDGWIYWTWKTELNDPRWTYSYATYLNYIPTNAAALQQNVYQDVCAGFR

SEQ ID NO: 429 - protein, 390 aa, Talaromyces pinophilus
MTFKTSYLASALLLLTARASAQTANAEAAFATLQEWYDPVTGLWNTAGWWNGANAMTVIAELAAVDASIVQDAISIFETTFSVAPSVNPSNGVEKSVGTNGLIQTTYPAGWPNNTISKRAIQDSTDPTVWLDGANDDAEWWGLAWVAAYDVTGNETYLNLAEGIFNEIAAGWGTNCGNGGIYWETTNHYVNAIASELFISLAAHLANRVPANAATYTAWAEEAWNWFASTGMINANGTINDGLTTDCVNNGQPVWSYNQGVILGGLTELNKISPNESYIESANSIAQAAIAALADSNYVIHDYACEPSDCEPNGTQFKGIFMRNLLLLQRASPNDLYSKVIEACAASIWANDRDTTTGELGVNWAGPFVGGDATTQSSAMGALVAAISVE

SEQ ID NO: 430 - protein, 450 aa, Trichoderma harzianum; identical to SEQ ID NO: 415

SEQ ID NO: 431 - protein, 523 aa, Trichoderma harzianum
DVYTVPSQPNANGEPLDGYVSYSIEFASFPDFAGNKSSPNTFSYNLINNLGALQGHKPYIRVGGNTQDYALYNASQKASLIGIVDPSRSPDYPTTIHIGDAYFESYGTWPGVQFSHGFNLGLGANRSEGWETLADTVPLACKALSHGNIYTWEYGNEPDLYSTSAQGPVRPSNWNESTYAWQWLNGTAEITSQVKKHCPTLALFGGPKFMAPSFAGTGNHLKAPLAFQDGLDKNKNIEYFSTHNYISGATSLGVTLQGTLMNHNRTVSSVQGHLPEYNAIFTTAAAQKATPLIFGECNSLYNQGRPGLSNTFGAALWGVDFNLYAASVGFKRVHMHMGTNYRYQAWQPVETDLASRGTKAPYYGSVAVAATLGNQELLPVSITNIPLASAYEAAYAAHYSSGLLKGHLARLTVLNMRGYNTTVDGEGLESVPNPPPRPSQTYTFAVSGARNGAHVGVQRLLANGSDAITGITFDGWSYNYELAKGKPVRLHNVTVGETAVVRNGQVTVEVPDSSAVLLNFPLL

SEQ ID NO: 432 - protein, 287 aa, Trichoderma reesei
MWSPKVAAAILAFVGLSNAWAPPSYGGFNLVWNDAFAGNGGTSPNTGNWNIITGNLNVNNELETYSSSTKNVQLSGGNTLQLVPWKDSSTFGGWTSGRLESKYTFTPQAGKVTRAEASIRMGSNAQANKQGIWPAFWMLGDVLRHGGSWPSCGEIDILEQVNGQPTGHGTLHCDVYPGGICNEGNGIGGPVNFNNPNDFHTWRVEIDRTSNNWQTETLTWSLDGTNFFQITGSRIGNQNVWNNIAHSPLFFILNVAVGGSWPGNPNSATLDGYGAMMEVGYVAQYST

SEQ ID NO: 433 - protein, 629 aa, Papiliotrema laurentii
MLPSISVFALLPLLLVQVQAAVVPARRVVADRDISFESVRNAVVAFAQPSLDPISDPISAFDTDSAPIPTPFFAAVQPTSTQTQENVANAQVFAAEQGEQGHWVVYTTSSWLAAADPTPTQDTTAPPVSSDAPSPSGGLPSGSYGQQIPPNQDQPQASTNPAYQPINSVVSSLLPSSLIPSLLPTTPSTLDPSPFPTSAPAFPTASPQPAPPTGGGNYMPGKHVFAHFMVGIVSTYHQQDWVNDMQLAKQKGITGFALNIGVDPYTQDQLDLAYAAAETVGDFQMFISFDFNWYKPDDTNGVATMMKRYVDKPAQLLVDGKPFVSSFIGDGFNWKACADLVGREIYPVPFFQPTSEHANDPGVSGLFSWAAWPGQLDNQPLKANMTLNRDEAYLDVLDPAGKQYMAPVSPWFFTHFGPEVSYSKNWLFYSESLWKTRWDQILELGARGVNFVEIVTWNDYGEAHHVGPYNTPHTNDGASKWAEGLDHSAMLEFAVPYIEAFKQGKREPVINKEMLVYWHRPHLKDVNCDATDNCGSKPKGWEYVDDVLFVTTMTSNGGTVIVNSGSGTAFIQSVEAGVQTFEVPMQVGEQRFQLLTNAGLSAGGSSNVTVTDSCWNGIYNFNFHSGIIA

SEQ ID NO: 434 - protein, 224 aa, Lecanicillium sp. WMM742
MRPFTALFVAFVSAASALTHAVDSSSEVSVAIYKKALGQGFTRAIFRGYQEACSQGGRVDPTFVPSYKNAVAAGYKDFDAYFFPCTGKTNKCKPYAAQLAELLDTIKGQKLAIRRIWLDIETDRVCNPFDYGAQGNLAEAKKLVAAFRDAKLDWGIYTSPTQWETIFGAKTVELAKDVPLWFAKFDNVETLELKTPFGGWTKADAKQYTDQSASNKFDLNVFSA

SEQ ID NO: 435 - protein, 223 aa, Arcopilus cupreus
MKSAILACVGFAAAVQATVQGFDISGYQPNVNFAAAYAAGARFVIIKATEGTSYISPSFSSQYTGATNAGFIRGGYHFAHPGASSGTTQADYFIAHGGGWTPDGITLPGMLDLESESSGTCWGLSASAMVAWIKDFSDHYHSRMGVYPLLYTNPSWWEECTGNSNAFVDTNPLVLAHYSSSVGTIPGGWPYETIWQNSDSYAYGGDSDVFNGDLAGLQRLARG

SEQ ID NO: 436 - protein, 226 aa, Clonostachys rossmaniae
MKSSLYLAFVALATVAVAAVPGFDISGWQKSTDFAKSYANGDRFVYIKATEGTTFKNPLFSKQYTGATNARLIRGAYHFAQPASSSGASQARFFVANGGGWSNDGITLPGAVDMEYNPSGATCYGLSKTAMVNWIEDFVSTYQALTGRWPVVYTTLDWWTQCTGNSAKFGDRCPLWVARYASAVGQIPAGWSFHTIWQYNAKYPEGGDSDIFNGDETRLKALASGA

SEQ ID NO: 437 - protein, 277 aa, Ochrobactrum lupini; identical to SEQ ID NO: 408

SEQ ID NO: 438 - protein, 261 aa, Thielavia australiensis
MKLTAIAAVASALAPASAYLISGDGVNCRSGPGTSYAVKKVYAKGTDVKISCQTGGTTVNGNSIWDKTQDGCYVADYYVKTGTNGYVTGKCGVSTCTAPKSNQATVDLIASFEGFVPNVYTDATGNPTVGYGHLCQKPNCAEVPYPIPLSQADGKKLLADDMKKFETCITSLFNNKVTLNLNQYGALVSFSFNLGCAATEGSQLAKRLENGENVNTVISEEFPKWVHGNGGTVLQGLVRRRNAEIALAKTATSDKALPAKC

SEQ ID NO: 439 - protein, 228 aa, Lecanicillium sp. WMM742
MKSFSSIIAGIAGLASVASATVQGFDVSGYQPTVNWGAAYSSGARFVMIKATEGTGYISSSFGSQYPGATNAGFIRGGYHFALPDRSSGSAQADYFLAHGGGWSGDGITLPGMLDIEYNPYGATCYGLSQGAMVNWISDFVEHYKARTTQYPIIYTTTDWWKTCTGNSPAFGQKCPLSLARYSSSVGEIPNGWPFQTFWQNSDKYAYGGDSQIFNGAYSQLQKIARGG

SEQ ID NO: 440 - protein, 225 aa, Pycnidiophora cf.dispera; identical to SEQ ID NO: 404

SEQ ID NO: 441 - protein, 224 aa, Cordyceps farinosa
MRASTALFIAFAGVATALTHAVDSSSEVSVDIYKKALGQGFTRAIFRGYQEACSLGGRVDPTFVPSYKNAVAAGYKDFDAYFFPCTGTTNKCKPYATQLAELLDTISSQKLAIRRIWLDIETDQVCSPFDYGAQGNIAEAKKLVAAFRAAKHDWGIYTSPTQWETIFGSKTFVLANDVPLWFAKFDNVETLDLKTPFGGWTKADAKQYTDQSASKKFDLNVFSA

SEQ ID NO: 442 - protein, 223 aa, Paecilomyces sp. XZ2658; identical to SEQ ID NO: 406

SEQ ID NO: 443 - protein, 225 aa, Acremonium chrysogenum ATCC 11550; identical to SEQ ID NO: 409

SEQ ID NO: 444 - protein, 235 aa, Blackwellomyces cardinalis, CDS: GH25 lysozyme MRAFIPVFLALAGAANALIHAVDSSSEVSVDVYKKALAEGFTRAIFRGYQEACSQGGRVD PTFLPSYKNAQKAGYKDFDAYFFPCTGSGNKCKPYAKQIGELVDAIEGNQLAIRRIWIDI ETDKVCNAFNWGAEGNIQEAKKLIAAVRGTKRDFGIYTSATQWENIFGSRTVELAKDVPL WFAKFDNVETLELKTPFGGWTKADAKQYTDKSASKKFDLNVFSA <Seq445;PRT/1;Malbranchea flava
MKLSLLLIVAASLAVASAGPKEFESRASGVQGFDISGWQSNVNFAGAYNSGARFVMIKASEGTTFKDRQFSNHYIGATKAGFIRGGYHFALPDVSSATAQVNHFLASGGGWSRDGITLPGMLDIESNPYGAQCYGLDAGRMVAWIREFVDAYKRATGRYPLIYTSPSWWQTCTGNSNAFIDKCPLVLARWASSPGTPPGGWPFHSFWQYADSYQFGGDAQVFNGDEAGLKRMALG

SEQ ID NO: 445 - protein, 227 aa, Purpureocillium lilacinum
MKFASVAASVSALCGVASAAVKGFDISHYQPNVDFAKAYADGARFVMIKATEGTTYTDPSFSSHYTGATKAGFIRGGYHFARPASSSGAAQAKYFIAHGGGWSKDGITLPGMLDMEYQSSSSACGGLSQSAMVSWINDFVNTYHAATGVYPLIYTSTSWWTQCTGNSAAFGSKCPLVVARYASSVGTLPAGWGFYTFWQYSDAAPWGGDADTFNGDITALKKIANAG

SEQ ID NO: 446 - protein, 216 aa, Aspergillus deflectus
MKLLSALALPGLAYAAVQGFDISHYQSSVDYAGAYSSGARFVMIKATEGTTYTDPAFSTHYTGATNAGLIRGGYHFARPGSSSGAAQAEYFLAHGGGWTGDGITLPGMLDLEAGCSGLSASAMVSWIQDFGETYKASTGRYPMIYTTTSWWSSCTGNNGGFGDYPLVLARWASSPGELPNGWSVHSFWQNADTYEYGGDSEIWNGSQENLVKFASQ

SEQ ID NO: 447 - protein, 233 aa, Hamigera paravellanea
MKASSILSLLASLALTSAAPLEARAGSVQGFDISHYQAKVDFAAAYRSGARFVIIKATEGTTYTDPAFSSHYTSATNAGFIRGGYHFAHPDSSSGAAQATYFLAHGGGWSGDGITLPGMLDLEYNPSGATCYGLSDAAMVAWIQDFVDTYHARTGRYPMIYTTADWWNTCTGNSSKFSQTCPLVLARYASSVGTVPGGWGYQTIWQNSDSYAYGGDSDIFNGDETQLKKLASG

SEQ ID NO: 448 - protein, 224 aa, Flemmulina velotipes
MRILLFIAVTIALGVHARLNGIDVSGYQPNVNWATVKANGVSFAYIKATEGTTYTNPSFSSQYTGATKAGLIRGSYHFAHPSSSTGAAQARYFVAHGGGWSGDGITLPGALDIEYNPSGATCYGLSTSSMVNWIADFSNTYHSLTGRYPVIYTTADWWRTCTGNSASFANNSPLWIARYASTIGTLPAGWSYATFWQYADSGSNPGDQDYFNGDAAGLKRLATS

SEQ ID NO: 449 - protein, 135 aa, Adineta vaga
MHLILTTLLTVLPALALGQINDKCLQCICKIESGCRPLGCAWDVNSNSCGYYQLKQVYWIDCGKPGGSLEACSKDKACSEKCVRAYMTRYGTRCTNGRTPTCQDYARIHNGGPTGCQKTATVGYWNKVAACYNSG

SEQ ID NO: 450 - protein, 227 aa, Parengyodontium album
MKSFGVIATGLATLVGVASARVQGFDISHYQPSVDFNAAYADGARFVIIKATEGTTYKDPKFSQHYIGATNAGFIRGGYHFAQPASSSGAAQADYFLKNGGGWSSDGITLPGMLDMEYNPNGSACYGLSQASMRNWINDFVNTYHSRTGVYPLLYTTTSWWKTCTGNTAMFADKCPLVIARYNSVVGELPAGWSFWTIWQYNDHYKHGGDSDAFNGDYSQLQRIARG

SEQ ID NO: 451 - protein, 225 aa, Onygena equina
MLKTIIYTTLAVASLASAAVPGIDVSGYQGNVNWANVANAGKKFAYVKATEHTNYINPYFAQQYNGAYNQGIIRGAYHYAHPNGASGASQANYFLAHGGGWSADGKTLPGAVDLEYGPNGSTCWGISQSAMIAWIRDFSNTYRAKTGRPPVIYTSTSWWKTCTGNYGGFGNDNPLWIARYSSTVGELPAGWPFHSIWQNNDNSGVGGDGDIWNGDLAGLQRFAKG

SEQ ID NO: 452 - protein, 233 aa, Penicillium sp. Qii
MKTTGVSLLLAAGTAYASTIQPRASGVQGFDISSYQGTVNFAGAYGAGARFVMIKATEGTTYIDSTFSSHYDGATSAGLIRGAYHFAHPDSSSGATQAEYFLAHGGGWTNDGITLPGMLDIEYNPSGSTCYGLSASAMVSWIKDFGETYNSKTGRYPMIYSTADWWSTCTGDSTSFSSDYPLVLAQYASSISTVPGGWPYQSFWQNADSYSYGGDSDLWNGSEDSLKTFAKGS

SEQ ID NO: 453 - protein, 233 aa, Trametes cinnabarina; identical to SEQ ID NO: 60

1-16. (canceled)

17. A submerged fermentation process of producing a polypeptide of interest, the process comprising:
a) fermenting a microorganism that produces the polypeptide of interest in a fermentation broth, and
b) adding at least one enzyme to the fermentation broth, or co-expressing the at least one enzyme in the microorganism and secreting the at least one enzyme into the fermentation broth, in an amount sufficient to reduce the viscosity of the fermentation broth compared to when the at least one enzyme is not added or co-expressed.

18. The process of claim 17, further comprising recovering the polypeptide of interest.

19. The process of claim 17, wherein the polypeptide of interest is a mixture of two or more different polypeptides.

20. The process of claim 17, wherein the polypeptide of interest is one or more enzymes.

21. The process of claim 17, wherein the polypeptide of interest is selected from a hydrolase, isomerase, ligase, lyase, oxidoreductase, and transferase.

22. The process of claim 17, wherein the at least one enzyme is added as a bolus addition.

23. The process of claim 17, wherein the at least one enzyme is added as a continuous addition.

24. The process of claim 17, wherein the process is a fed batch fermentation process, and wherein the at least one enzyme is added in the feed.

25. The process of claim 17, wherein the process is a continuously fed fermentation process, and wherein the at least one enzyme is added in the feed.

26. The process of claim 17, wherein the at least one enzyme comprises at least one enzyme from a glycosyl hydrolase family.

27. The process of claim 17, wherein the at least one enzyme comprises at least one enzyme selected from a muramidase, chitinase, glucanase, mannanase, nuclease and phosphodiesterase.

28. The process of claim 17, wherein the at least one enzyme comprises a GH24 or GH25 muramidase comprising an amino acid sequence having at least 80% sequence identity to the amino acid sequence shown in any of SEQ ID NO: 1 to SEQ ID NO: 453, or a mature version thereof.

29. The process of claim 17, wherein the process comprises adding up to 20,000 mg of the at least one enzyme per kg of fermentation broth.

30. The process of claim 17, wherein the process comprises adding up to 500 mg/kg of the at least one enzyme per kg of fermentation broth.

31. The process of claim 17, wherein the process comprises adding the at least one enzyme in an activity ranging from below the detection limit of the muramidase assay and up to an activity of 0,200 limit of the muramidase assay when diluted 4,000 times.

32. The process of claim 17, wherein the process comprises adding the at least one enzyme in an activity ranging from below the detection limit of the muramidase assay and up to an activity of 0,200 limit of the muramidase assay when diluted 100 times.

33. The process of claim 17, wherein the at least one enzyme comprises a glycosyl hydrolase and a phosphodiesterase.

34. The process of claim 17, wherein the microorganism is bacterial.

35. The process of claim 34, wherein the microorganism is a Bacillus species.

36. The process of claim 34, wherein the microorganism is a Lactobacillus species.

37. The process of claim 17, wherein the microorganism is eukaryotic.

38. The process of claim 37, wherein the microorganism is an Aspergillus, Penicillium or Trichoderma species.

39. The process of claim 17, wherein the at least one enzyme is added to the fermentation broth by co-cultivating a second microorganism in the fermentation broth, wherein the second microorganism produces and secretes the at least one enzyme into the fermentation broth.

40. The process of claim 17, wherein the oxygen transfer rate is increased by increasing the agitation, stirring speed, mixing or oxygenation of the fermentation broth during the fermentation.
